United States Patent Application Publication US 2015/0086982 A1 - sequence listing, part 10

SEQ ID NO: 125 - DNA, 1114666 bp, Zygosaccharomyces rouxii
ccgagcatagttgtataaatgcatgtaagaaacatttcactttttccaattgtgacgctaatgcacaaagcccactggagaaccgccaaaggaaaacaaaagatgtatggaaactattcaaatcgctcatctggcggttattgatgggtacatcgtcttctttaactaattcgtgcttggggtgtcttcttctttgatgatggggcttacaatgggtatccatattgattatctatggctcattgttgtaatgttttcattttgatgagttcaatttccatatctgatttcactttcatgctgcccaatacaagcggtccttacttctggactttaaagttactctgggagccgatacaaaagaacagtgttaaaattgatgaaccaagatttctctgaaaccgaggtaaaacagttggaaaggtactgcaatgctagaaacgaagtgcagcagcctaggtcgaaaaaaaatcggatactggactgagtaattatgttggtgttatctttaccacctctggtgtatttaattccctcttgttaagcattcttgggataaactcgttgatatacccacgatgccagcttcaccgctggcatgtcttcctcgcttatcaaatactgaatatttctaccgcgctcgcaggatgccatggtaaatagcttccagtcacctctaaatttggtcttgttgcttccgttttttcctgctgtataaaattacttgattctatgatcagccacagcttcaaccatgacattctgtggccagcggcaaaaacaattttccatgagttcgataatagaacccactggtcatcagcagtcaaatttactcgaggctgttttataggcgctggaaagttgctgggatcgattcggcaaagtacgtagtcgacagatacggtttataatctgtcccataaatctgtcccaaggtattgacatgcagtgttctttttggattcttgaacagttttatccattcaattgttatcgattgttatcaggaatctttttttctgcaattttcgtcatgttgctccgatgacgataaaaatctgatctcgtctctcatagcaactcagtaacgtactcacaacatggaacaacagaggtataaaatgaacaaacatggaatccgataagaaatctcaaaagcctgttttacccaaggacctctttagaaatggcttaacttagatgttttatgaaatgtcgaagcattgtttccacagtgtggtctcatgtacattctgcgtcatcgcctgggtagcattttcaatggatgcttcttatcaagatgtccctggattctacatgattggccgtgttgttttcgattttgcaatttgctttcccttggatggctctattattcgaaatcgcatcccaatacgacattgttggttcagcaagtattggaattgaatcccggaatggatatcaaataatgggatggaatttcaaatagattaaacccttgcctttatcaagagcatatctggaacacaccttactttttctatgatggtcaacgggttcaacttaattttagagataacgttttaagaccatatctcaaagggaaatttgaaggtgttgctgatgtgaacaagatccaatcagcaaggttttacctacaatcagtgaatgaaaattttaaactaccatcaagaaacaatttgccagaatcaattctaaattctgaactacccagggacacctacagaaacaaatctacgcttcattcgcgatatctgttcatgggattcatggtttgtttctttcaaggtctaatttggttacgatcgtacttttatttgtacaaaaatcgttttggatcctgcctacaatcataaactacctgtgtgttattaaagtactaccgaaatggctatcgcttcatgtatccagaaatggatgtaatgaaagcaatggaatttttggcgataataacaaaagttagtcctggaaaagaactggatcaatgggatcagataaccaaatatacgaatcaatatttgatggagggaaatagcggccattctaagaatatatttttcgaccgtaagcattgtttagacttttacaaaacttgctttgagcctctttccgttgaaaacagcttggtttatggagagttgaaggaaattgtggagtttacaaaacggagtaaagaaacaaataaatccgattttttactctcaacctgagagtggcagtgtatagtatctcaaaatacgttggcatcacacgtactgctaccgatggtccctgggagtacttatttcctgtggagtagttgtcttaactaaaaatactgcctcttggtcaaagataaaccatagggacagtaagcaggaaagaaggataaaaaataaaaaataaaaaataaaaaaaaaaaaagattcaaaattgacggtcctaagtttaattaaaaatcctcatttgtatgaactcacccttgtaattacctgtggagattttctccgatagctatctccagattgacttccattgcatttagtggtaatttttatgttcctccaaagatgatatcattccaatgaagcttccgaaggtagacataatcgacagaataaatttctgcctagtataataactgctgttccaggcgtgagcttgggacaatgggatcaaatggaaaatgaatcagcatctacaaaatagaaattccagtgacggaggtaaaaatgagagttttttctaaaccaatgctttcatttttttaaaagagttcgaacctcttgtttccgatatggatgtggctggaccaagaagttactcgagccgcttgtctctggccaattgtcactataccatgccctggactgtattgctgcggatgcgctcagagcgtgcgaacctccttctgagtgaatcgatgtggccttataacgttaagaatttaccggctaataacggcctcttgattctctgccaataaaatctgctttggtcatgggtattcaaagacattggttttgagaagttttaaatgaatagtagaaccattgttcaaaacgatgatttttgactgacaccacagaagcccagaatagacgtcgaagaagggactaggtctaagtgtgctttttatctcttatgaccaacatactaatgaggggtagcgaataaatcaaaaatagcacgagaaatcagcaggacaatgagggccagtgccataatcacaaaggacacatattctattatcaccaagtaaaacaatgaggtgttgaagatactatgaaacttctcgaaaataccatctctaaattcatctttttctgccgtatgtgataatttaccaaaactttcaacgcacttgttataattcgcaagtgctctctcagtaagcgctttatttggtggatttttccaaaaatttactaccgtacttccttcttgataacacctgatgtcgtacgtctgacgctctattggttttacgatttctctcacaaaaaatcgcatacaatgctccccactgtaaaaaagaggataatgatgtcccccctcttcagaaaagtgattaactctagatgcaattctctgccaagctgctggatccccggtcaggtccatttcagccacttccttcaataacttttggagcgcttttgtctcaatattaaagtttttcctatgatagatgaagttcacaaaacacgtagtaaagcataggagataatgaatgatcatccataaaggagaaaatatgtcagaaggtttcatttcaagttgagtatcaaaatagtcgcgcagactaaagtacgccaaccgtatcaataataccaaaagtgcaccgaaaagaggaaatatgatgtcggatatccattttttttcgaagaaatatggggcaaggaagtatgtcaactttccaccagaactgtcctctggcaattctatttcctcctcttcaaatgtctgcacacacttctctaagtccatttcactctcgtcacttattatactcatattgtcttgttggttaaatacaccattgctgtcgcgattgtcagtttgtgtctgaattgccgccctttatatatttttcaccccagactgttccgccccttgattgtttcctccccgcgcgacaattccatgcagaagaaactcgaaagcgtcaaaatgataaaattgacacaaagaggcagacaggtaatttgaaggtcaatttggaaactctttaattaatttctttgtggcatacaatgtcctaactgctataaattgtcagaggaaatcaaaacatgatattagccgaatgaagaaggacggccccagaaaattggcatgtccaacaaaaagaagagtaagagtaaggccagcgagagccacaagcgtggtggaagagagaacagtcctcgtggacaacacaactctccctcactacaaagagacaacagtatctctgatcagcaaggaagcgagaacagcggtactggctctggaacaaacgggatcaaattagccgctcgcttgttgcgcaatccattgttctccaaaagagggtttgaacatgcaaaagagggattaaaaagtgagagaacaggtgactcaataagcacattaaagtgtataggcagcggacttctcttcctttatcctattgtgttcataatatacagtatcttcggtttagcatctggagacaaaaataatagtatacatgtttttgtgtatggcggtccactattcactgctgttccttatttcatacgttacttggatgatgtcgatacattgcttttaagtatatttgagattggggagaagagcttgctcggatatttcgcagacccaggaatcagagagtttctcttgactgtttttgagattgctggactcatttatcaatgcgtaaagggtaggcaaacgtttaaagtctttttttggggaattgtcggttttattttttatcttgtaggaaatattatcctaatcttggagagaaagaaaaggccagaatcggtagtgggtaattcgacgtgagtttcaaattcacaccttgctataaaatcctgattgtataatcatgcgaccggacgacggaagtgagcttacagtattgccggcttatcatctgtgggttatgttcaggtgtaaacgctagtcagttttcgatagatagatcatatataaccatcaagtttaataaatccacgaggtaccgatagaagtgttcacgacgttagctcagcaacgtacacaattttaaagaagcaatactgcgtactcttataaactgaacgtttgtgcgaatagggcagaattgcttcacgaacaaaagggcaagaaactgtcaaagcttcccatgtcaagtgcgaacgacatcaagttttcagcagcgttgcagttagcaatgggggttatatatagcccttaatatggtacaaacagtagaaaatgatctgtttctgattaagccaatggccatggaggggccgaataagtgcccaaaagcctcttgatcttagggaatatttcactttcgcatcatctttttgccagaaatatctctacttttaagcgagaaggacattacaaaggtgtacatgtataggtaacatgaactttgtttgaacttgcatggattgttatccattgttatcagtaatccctttttctgcaattttcgtcacgtcgctcccatgacgataaaaagctgatctcatctctcatagcaactcaggaacgtattcacaacatggaacgatagggatatagaatgaacaaacatggaatccgataaaaaatctcaaaagcctgtcttacccaaggacctcttgagaatggcttgacatggatgttttatgaaatgtcgaagcattgtttccccagtgtggtctcatgtacattctgcgtcatcgcctgggtagcattttcaatggatgcttcttatcaaaatgtccctgtattctacatgaatggccatgtggttttcgaatttgcattttgctctcccttggatggctctattattcgaaatcgcatcccaatacaacattgtggttcagtaagtactggaattgaatcccagagtggatatagaaaagtgggatggaatttcaaataaattgaatcattgcctttatcaagtacatatctgggacactccttactttttttatgatggtcaacagtctcaacttgcatacagggataatgtttcaaggccatatctcgaagggcgatttgaaggtgttgctgacgtggacaagatccaatcagcaaggttttacctacaatcagtaaatgaaaattttaaattaccatcaagggacaatttgccagaatcgtttctaaattctgaactacccagggacacctacagaaacgaacctacgcttcactcgcgatatttgttcatgggaatcatatttttgcagcttcaatatcaagttttgttgggtatcgtaatgggattttttcagaagttattttttactttgttttgttgcatattttgggatcagattttctcaagagataataactggagcttctattgtttggtatatccacagatggatataatccgaggaatggattttttggcgataataacaaaagttagtcctggaaaggaactagatcaatgggatcagataaccaaatatacgaatcaatatttgaagggggaaatagcggccattctaggaaggtatttttcaacggtaagcactgtttagactgctaccacgattgctttaaaccactttccgttggagacagcttggtttatgggaagttgaaggagtttgtggagtttgtggagtttacaaaaccaagcgtagagtaaaaagagagacaaatacatcgtggtttttactctcaacctgagagtagcactgtatagtacctcaaaatatgctgacatcacacgtactgctaccgatggtccctgggagtacttatttcctgtgtagtaattgtcctaactaaaaatacttcctcttggtcaaagattatctataaggacagtaatcaggaagaaagataaatgagttagaattcacggtcctaagtttaattaaaatccttatgtgtatgaagtcatccctgtaattacctgtgaagagtttctccgatagctatctctagattgacgtccattgcatttagtggtaattttatgtttctccaaagattatatcattccaatgaagcttccgaaggtagacgtaattgacagaataaatttctgtctataataataactaccgttccagttgggaacttggaaaatgggatcaaatgtaaaacgaatcagcatctgcaaaatagaaatgccaacgacggaggtagacgtgatagttttttcgatggcaatcaatgctttcatttttttgaaaaaaagctcaaaccccttattttcgatatggatgtggctggactaagaagttactcaagccgttttcctctagccaattgttactttaccatgaccttgactgtattgttgcggatgcgctcggagcctgcgaaactccttctgattaaatcaatgttgccttgtaacgttaagaatttatctgctaacgacgacctctcaattctctgtcaataaaatctgcttcggccatgggtattcacagacatcatttttaaaactttttaagcaaaattagaaccatgactggaagcgaggttttctgactgacgaaccacagaagcccaggatagactttgaagaagggactagctatttatgtgcttttttctcctatgaaaagcatactaatgaggggcagtgaatgaatcaaaaatggcacaagaaatcatcgagataatgtaggtcaggtacataaccacaaaggacgcagaatgtattgcccccaaataaagtattgaggtgctgaaaatattgagaaacttttcgaaaataccatctctaaatttatctttttctgccgtatgtgataactctccaaagttctcaacgctcttgttataattcgcaactgctctctcaactagcaccttatctggtggatttttccaaaaattcacacacattcttccttccaaataacacctgatgtcgtacgtctgacattctattggttttactatttctctcacaaaaaagcgcatacaatgttccccactgcaaaacagggaataccgatatcctgtctctctagaaaagtgattaactctagatgcaattctttgccaagctactggatccccggtcaggtccatttcagccacttccttcaataattgttggagcacttttttctcaatattaacctttttcctattgtcgatgaagttccaaaaagaaaacgtaaagcataggaaataatgaatgatcatcaataagggagaaaatatgtctgaaagttttgtttcaaatggatcatcatataagtcgcgcataataaagtaaggcaaccgtacaagcgatggtgacaaaaatgcagctgaaagggaagcgataatgtcatctaaccatgttttctcgaagaaatatggggcaagaaagtatgtcaactttccaccagaactgtcctctggtagttctattttttcctcttcaaacgtctgcacacacttctctaaatccatttcactctcgtcacttatcacactcatattgtcttgttggttaaatacaccattgctgccgcgagtgtcagtttgtgtctgaattaccgccttttatgtcttttcactccggattgcttccccctttattgttccctccccgcgggacagtttcatgcaggagaaactcgaagtgtcaaaatgataacatatatatacgaaagcggtagacaggtagttcaaagatcagtttggaaactctaatcagagcactgaaagattgccttatgtctggtgtgtcggcaccttatgtcacttttgtatcacggaatatctcatcacggaatatcgccttcttatatatttctactttcaagcgagaaggacattataaaaggtgtatatgtataggtaacatgaactttgtttggacttgcatggattgttatccattgttatcaggaacccctttttctgcaattttcgtcacgtcgctccgataacgataaaaatctgatctcgtctctcatagcaactcaggaaactactcactacatggaacgacaggggtatagaaagaacaaacatggaatccgataaagaatcacaaaggcctgttttaccacaggacctctttagaaatgagttgacatggatgttttatgaaatgtgtaaacatcgcttcccctgggtggtctcatgtttatgtctggtcgccggatgggtagtagctcagatgaattttacctataaaaatatgcttgtgagtgacatgactgccggtgctctattcggatgtgcacttgtatggcccttcgtaagggttcgctatttgaaattctatcccaatacaacagaactagttcagcaggtgttagaatcgaatcccgaagtggatatcgagaaatgggccgaaattgcaaatagactgaacatttacttttaccaagagcatctctggagcacgcctcacttttttttcaataatcaacatgttcaacttgtgttcaaggataatgttttaaggccatatctcgaagggaaacttgacgatattaccgatatggacaagattcaatcagcaaattgttatttgcagtcactaaatgaaaagttcgaattattattgaaggttaatttgccggaacccgttttaaactctgaactacctagaggtacccacagaaacaaattctccttttatgcagcatatttgttcgttggattcatggtttgttattatcaagcactaactttgcttatgatcgtaatggcatttatattaaatttttttttgctcttgattaatgccatacttttccagtatcttaccttgagaatatatcaggattcttattgtacgctatatccacagatggatataatccgagcaatgaattttttggcgataataataaaagttagccctggaaaagaaccggttaaatgggaccaaatagccaggtatatgaatcaatatctagctgaagaaaataatggccattctacgaatatatttctcgacggtaagcattgtttaaactgttacaagacctgctttgagcctctatccactaataatggtccttcgaaatactgcgatttgaaagaaattgttgagggtacgcaaccaagcgtaaatggagagactaattaatgaagcaatgtattccttcttcgcaaactgaacgtagcagtatatattggtttaaaatatgatggtatcacaagtgctgcgatagacggtgtctgagtgtcatgaagctacatgacatgtaatctcaaggtggtaataaacatactttaatgtgttttggtgtcacttacaataatattattatatgatgaggtcttagcaccaatcaaggtctgggatgtagcttaatgaagagaagaaagattgtccagaaataatataatcaagtataagtgatcaagtctaaattacatcttattcttactagtgatcggaccgcgcctcattgcaagcaaagcccaagagacccacttactcagatttttgcggtagaatttgcagctttatggcctcatctgacgaacggtgaccactagcagaagtaacctgtatatgactggagcatgcgaaaataaatgacacatgtgtacgtaccaagcggacgaaataatcaggacctcggtatgtgtctcgggtaataatttcatatttctaaaatacttgaaacaggcgtataagaaatgtaccttcatatgcacgatgtaagctgaccaatgacagcactttctagagaaattctttgaatatttcaaccgtgatatgcatcttctccacttccaggtagcatatatagcgtctcgtaccttgaagcattcattagaatctttttagggacttgatgttgagaagttccgtataatactcagtaatgtagggatcgacgataagtgtttctgtcaattttcctttttgcaaccataacttcgttattttttcacttcatatggtctgcaacttctgagaaaggtaccaatatattattggtgcctagaaacttatcatttcaagtcattctgcttcgatgaggtgccataaatattagtttgaatatcagaattttgccagctcttttaccttcaattgaacaatcacaactcgtattcttcttaccttactcaacccttcacctatcgaattggttacctacgagaacaggaaactttttaacagtagctcatttaactcaaactccataagagttgctgttgcccgcttttcgaaaattaattaccaccagtgtaagtttctcctgttacacaagtacttggactgtcttttgatgtgttttttatcccttataaaaacatgctattaagcggtagcgaatggatgaaaaatgatccatgcaatcatcgagataatgaaggtcagcatcataatcataaaggaagcaaactctattgcccccaaataaagtattgaggtgctgaaaatattgagaaacttttcgaaaataccatgtctaaatttatctttttctgtcgtatgtaataattcaccaaaattctcaacgctattgttataattcgcaagtgctctttcagttagggccttatttgatggatttttccaaaaattcctgtacctttctctttcgtaataacacctgatgtcgtaggtctgacattctattggttttacgatttctctcacaaaaaagcgcatacaatgctccccactgcaaaaaagggaataccgatatcctgtctcttcagaaaagtgattaactctagatgcaattctccgccaagctactggatccccggtcaggtccatttcaccgacttccttcagtaacttttggagcgcttttgtctcaatattaacctttttcctatggtcaataaagttcacaaaaagcatcataaagcataggaagcaatgaatgatcatccataagggagataaaaagtctgaaagttctgattcgagtggatcgtgataaaagtcacacagactaaaatacactaatggtgtaaccgatgacaaaagtgcagctgaaagagaagtgataatgtcatataaccatgttttctcgaagaaatatggggcaagaaagtatgtcaactttccgccagtactgtcctctggtaattctatttcctcctcttcaaacgtctgctcacacttttctaaatccctttctccttcgtaacttatcatactcatcttactgcgttggttaaatacaccattgctgtcgtgagtgtcagtttgtgtctgaattgccgccttttatacattttcacctcggactgttccgccccttgattgtttcttccccgcgcgactattccatgcagaagaaactcgaaagcgtcaaaatgataacacaaagaggtggacaggtaatttaaaggtcaatttggaaactctaattaaagttctgttaataactttgtgtcataaaatgccctaactgctataaattgtcagaggaaaccaaaatgatattaaccgaatgaagaaggacggccccagaaattggcatgtccaacaaaaagaagagtaagagtaaggccagcgagagccacaagcgtggtggaagagagaacagtcctcgtggacaacataactctctctctccacaaagaggcaacagtatctctgatcagcaaggaagcgagaacagcggtactggctctggaacaaacgggatcaaattagccgctcgcttgtttcgcaatccattgttttccaaaagagggttcaaacatgcaaaagagggattaaaaagtgagagaacaggtgactcaataagcggagtaaggtgttttggtagcttctttctcttcgtttacccgtttcttttgataggatactgtatccacggtttcctagctggggacatcaatagcaaaagtgcttttttgtatggcattccattatgcattgctgttccttattgcatacgttacttggatgatgtggatacattgctttcaagcatatttgagattggggagaagagtttgctcggatatttcgcagacccggtaattagagagttcctcttaactgtttttgagattgccggactcatttataaatgcattgagagtagccaaaagtcgcgaatctatgtatggagaattgtgggttttgttctctatctcgtaggacatactttgctaatattggaaagaaagaaaagaccaggatcggtagcggatgcttcggcatgagtttctaattcacaccttgctataaaatcctgattctataggcgtgccactggacgatgggtttgagcttacagtatcgccggtttatcatctgtgggtcatgttcgagtgtaaatgctagtcagttgtcgataagtagattatatgtataaccatcgagttgaataaatctatgaggtaccgataaaagtacgcatgtagtcatttcagcagcagacacaaatttcaagaggcattgtcgtttccttataaacttaacgtttgtgcgaatagggcagaatgcttcacgaatgcgaggtcaagaagctgtcggagtttcctatgtcaggtgggaatgacattaagtcttcggcagcggttcggttagcaatggaggttgtagagatccttcaacatggtagcatattatctatttctgattaagctagtgtcctggggaggaattgaggaatttcctaaaagcattttgatctcaggagtgtatacccactcttgtgttgcaacgtaacattttgacaggatggtttctcatatatatctactgtcaatagggaaggacattagcagaggatatatatgtatagctaacacgaactttgttcggacttgcatcaattgttatccactgttatcaggaatctctttttctgtaatcctgttcttgtcattctgatgacaacaaaaatctgatctcgtcttttatagtaactcaggaattgtacgcattgcataaaactggagtttaagcaagaacaaacaagaaattcaagacgatgagttaccccgttttccttaactttgtttttttgaaagtatatttacttccggccagtcgaatattcttcttccccggattccaactggtatttttttcaagactgttcgcttcgtccagcgagcacaagaaaagctacgggaagagaacaagacatagggccgtcattggtgctatgactattgcaaaagactattttgtagtcggacgaacctggttgttgagctttctcccttttacctcccgtagtttgtgttccatgctaaaaaactatttaacaaaagctcggtatagttaattttttttttttcaattccaccccagattcgactctacgagaccaaaacgttaaagttttaaaacaatgcttccaaatcatacactgtagttgtaataggaagtatctgttagaagataaaggctgggttgtataatatgcttttccttttcgaattatccgtaaagttttcggaaaaacaaaacgttggacaccatcataatagaagtagacatacttatagagaatagtgctttcaagtaacaagaaaaactatgaattaggaaattctattgaatagtaatttctaagatattctttgggtaaaaaaaagatgatagcgtatagttggttttactacggatccaatactctttcattctagaagcattaaatagggtttctggatccatgatgagttcatactgaacaaaaccgagttcgtttacttccccttcaaatatatcacttctcgatcgtaagatcgtaacaatgtatccaaatcaaaccttaactcacggtattactaatagactgagcgtgtaaccaaaacatgttccgtgtgcaaggaggtttacttcggtaatggcatgataagatgtgtataaaaggggcgaggatcagaaacgcagtttattagacgatgcaaaatgcgttatgctttttctatcttctcatataaagaggaacaataccttctctaaaaaaaaaaagattgactagcaaaaatgggttcgatcaaaccagtaaagttggggaattctggcttgaagatatcaccaattttagttggctgtatgtcatatggttcaaagaaatggcaagaatgggttatagaagataaacaagaggtctttaagattttgaaacactgttatgatagtggactacggacgttcgatactgcagatttttactctaatggaataagtgagagattactgggggagttcttgaaaacttacaatattaatagggaaacagtggtcatactgagtaaggtgttctaccctgtcgacgacacaatggagctgaatccatcatttgattcagtcgaaaatgaattaaacctatcaaaccagcgtggtctatcgagaaaacatatacttgcaggtgtaagcaattcagtcaggaggttgggtacatatatagatgtgctacaaattcacagattggatcatgacactccaatgaaggagataatgagggcccttaatgatgttgtggaaaggggtgacgctagatacatcggcgcttcttccatgctggctaccgaatttgctgaattgcaatttattgccgaaaaatacgactggtttcagtttatatcctcccaatcgtgctataatttgctatatcgtgaggacgaaagagaattgattccttttgccaaaaaacataatattggactgattccatggtcacctaatgccagaggcctattaactcgtcctcttcgtcagacgactgagagatccaagaaagattgggggtttaaagtcgtaaaattggataaactagaggatagtgacagggaaattattagtcgtgtggaggcaataggcaaagagaaaggggtttccatggctgccgtatcaatggcatgggtgctgcataaaggttgctatcctattgttggtctgaactctgttgaacgagtggacgaagcaaaggaggctctcagtataaagcttaccgatgatgaaatattgcatcttgaggaaccatataaaacaaaggcttcgctcttttaataaaaaattctaagcagactgcaaactgtacattggttgctactctatacctggttgcctttgacttgagatatacggtactgtttaatactataaaaaatttgcattattagtttttttgggtactggtcgaattggaatttggactttcgataagaaatcttctgaaagaaaaaaaaagtattggtttatcatcttcacatccccgtcaacctcaaaaatttcctcgtgcagatgttagtgtagattacatgttttgcatccttgtcctcactttcgtggacagctttatcgtacaacgaaatcctttacttgtttccttcagtgctcagatcctgtcatcatgttaaaatgcaaatgaatgaaaagtttattttacttgggaatcctcctaccttccaaatgacctcttcattggtatcctggtaccgccaatcttatagggcggaagcatctctagcagaaatcaggtaatctctttaaacagaattaatttggaaagaaatcccacacagcacttgaatgaaaccataacctacctggtccttggtaaaacggactgtcgaggcgatactcagtccagagaggatctaagaaaaagacatcactcttttgaaagtccaattcttgaatcatggcatcaacaaccccatgtcggataaggcgggcgcctatggtgataaatctttgggacaggctggtatatttcaatcagtcctgcgtttccccgggctataatagtcaacgccagctgttacatgcaaaaagaagatatgaaaaaactacgaagactttttcgaggttacatttcattagttggaaattttgtacgtcattataaataattagaatatgtttaagatatgctcaggcaaaaaatctggtaattttctctctgtaacttttacccttggagaatttttcaccatttgtatcctgctccccgtctaattcatcttcatcttcatccacaaaggttgcatccaaatctactcttctgccttcatccaagtctatagtgagtaggtcaacggttttgaaactgtgggtttttaatagggatatcccgatgtacagaacggcggcagcaggtaataacacatacgcatccacaaagtcaccggctttaaatggaacaaacgaagtccacccctggatcaaagcaaggaaaatattggcagctataccgataatttgtgtgtatgggtagaataatgccttatacggaagttccttgaccgttcttccctgtttaatccacgcttttctaaatcttaaatgcgtcaacccaatagtaccccacacaataaatacaccaacaccggaaaggttcacgatatatgaataagcagttgatgcccccacactaacattcatcagcgatactaaacccaaagcattgaacaaggtgattgctgggataggaacacctcttctatcagtccatgctaagaattttggcgccaaaccttcatgcgctagattcgtaatggttctgcttccgatgaaaagtgacccattgatagcagatatacaagttaccagaatgaatgcattaaccaggtgcgtaccaccttcccaacctgctctagtaatagcaattgaaattggggactttagagctttcgtgccggcgttaagattatgatcattgtacggaactgttacaccgtaaaaaaaacctataccaatgtaaaccaccaagattctccagaaagtttgtctaatggccagaggaatggctctatttggatttttggactcactggctgagtaagccacagattcagttcctgagtaaaaagtcgaacaaaatacaaaaacctctgcaattcccttgaatccatgggataacgcacccgggttattccaatagtgaaatccaaatgctggtctatctttgataccgccggaaatataaatggtggagaatatgtagaaagccaccaaacctaatattttgaaccacgaaagccaatattctatttccccaaaagcgccaacaccagccatctgaaaagcctgaaatgccgcccaaaaaattagaatataaccgtatagtggaacttgaggtccccagaactgaaaaatagaggaaagtgtattatactcattggccatcactgcaaaaaaaacaacgatatatgcatatccgcaaacggcagacaaactatcgctatgaaaccttctcgcaagagtagtaaatccaccacccgatggatacaaggtaatcatttcacctatggattccataattgtgaaagctataataccgatgatgctaaagccaagcaaaagcgctagaggtccacctttcgcgagagcattacctgctccaacaagacaaccaggtcctatgataccaccgagagccaatagcgatatgtgtctatctttgagggctcttttgacaccagttttcggatcataaagagaagcgttatggttcttcccctcgccagtttcgatttgatccggcgttataccagaagaagtatatgattcgcacgaagcatcatcgccttttcctttggttaaaatattaatatccgtccaacccattttcgtcagtcagtgttctagccaaaaataaaaagaaagcaaaacacctactcgatcctaaaatctggtattggtaaatggtatctggattatgagaaatgataatcattgtctttcttatgtatgaatatcaagcttgttagcaatatgcaaatatttcatcagagtgaccaatggagacacaccgtggtttccattaaagtaatgaagttcggctgaggaagtgacgaaagtaataaagcattatagtgctaaattgtaaagtacagtgtcaggtagattatgcaaagttagactttgacacacaacgactttaaaatcgtcataatcacgtgattatggaagacacaatgacttcggactgccaatgatagaagcagcacccccaccatgaaaagacagccctctaaaataagcatagctatcattgctatgttcccagcatttagacgcataacatatggggggcggatatgtcagtacctgagatatagcgtcaaatgaagtttaccttaaaggttgtgttttggtcgaaattcatatcacagcttcatttcttggtaacgctgatacacaatgtttactccgagacaaaccctaagtcttcatggaactaatagagccctacttccgattatcaaaatgttatctttttatccgcgtgccttcgcttactggatcgccacactttgaaattaggagacatactgaagaataaacataatgtgctaagaatttgattctcgaaattctcgaaattttcaaaattctttagatggataaacatgaggttgtttgacggattaaactggaccaggttttttctttctttgacgaagatagggaaagtcacattcctgttagttagttaggtgccactagttaaaacttggcaaatcatcgtaacagaatagaagggaatggatggtgagattgcacagcctctactgaccagaacggtgtctagttcaaacaagcagacaaatgccgataaaatcaatcaacattatttgtccatcagccattcagacgttggagaatatagagaggaacccaatgatgacgaacaaggagaccttgatgacgagactactcctttgtcccgcattccgcatttatggctcattgaagcagcgttgtacacaaacgtttttttatcaggtttcgacagcaccgttacggcatctacataccaaaccattggaaatgagttcaatcatatggacctttctagttggatcacggcttcctatttgattacttccacatcatttcagccattatatgggtcattctctgatgttttgggtcggcgaaaatgtctattctttgcaagcatgattttttcgataggttgtttgggctgtggcatttcaattaatatcctttggttaagttttatgagggctttcactggtataggtggtggcggtttgatcacattgtctaccattgtcaattcggacatgataccaacttctaaaagagggattttccaagcttttcagaacttgctcctggggttaggtgctatttgtggagcttcatttgggggtgtgataacctcttccatcggttggagatggtgttttctattacaggttccgatttctctagccggcgctttaattggtcacctttatgtcagaaaccaggatgaatacgaaaggagaaaatcaaaggagtcttctcagactaaagagatgcttaagcatatcgatttctcaggtgcgtttttgatcatcatcggattgacattacagttagtctacttgagtcttggaagtgctgcagatgaatctggaaacacttggagtagcccgggattatctgccgtattggtagctagctttatcgttttggtattgtttgttcttacggaagaaagaaccagtgccagggccattattccttcgaaattagtcaggagtttattcagttttctggtgttaacaataagcgtcctcgttgggtttgcaagttatgcgtaccttttcaccttacctttatttttccaggttattcttggcgattcgactgcaaaagcaggcttaaggttagctattccatcagttttcacaccagtcggtggacttattgctggcatttgcatgagtaagtttaattgtttgcaaacattgctgtatgtcggaatcgcttttatgtgtttggggaactttttattcttatacataggagccgacgctacggattcgctaataggcttcttcttgattccagcaaatctgggacaaggtataactttccccagcagtttgttcactttcattttcgccttttcgaaaatcgaccaagctactgccacttcgacgctttatttattcaggagtatcggatcagtttggggagtaacaggctcagctgggattgttcaattctgttttagtcaccacttggaaaaggccctggaaggattattggatgaaagaaagataaggaagttgataaaaaagattacttctaatacttcgtacatcaaggagcttgaggggccagtaaaggtggcggtgatcgaaagtttcgacacagcaactaaaaaggttcacctaatctctacttctttttgcctggttgcacttatcttgtgcgtaattaaggacgttttcaaacctaaaaccactaaatcgtaactgaatttggcatatacaacttttatgaaccatttcacgttaatttcttcctgatgccattgtcttttagttcctgtatgtattagtttcatgtaaaagtgccaagccgttttcggcggtaagaacaaaggaaaaacgaaataacaaacaaacgcaatactcgatagacgtaagtaagcatattggttattcgttgcatagaatacccttttcatctcgcttgaacatattgtagaaaatcttttcttttttggccaaacagttccagaatcattattcctgattcgtagtttatcttcatgtttcgtagcctcatttctctaaaagcatcaagagaagctgcatttcgtagttaaaccgcttaaactgaaagttgtcgtacaattcacaccgtaggaacacatcaagctaacgctattgcccctcttgattttctttgtcactgtaacgctcggatataacgctagagtctcttgatcaatacaactcaatacgactcaaatctgcagcgagaacgaaagacacatcatactgctgcagcggtggtaatgcgttgtttttcttgaagagaatcctaaaagacaccatacaaaatcatgtagcggctcatattttgaaaagaccaatagaactttctctcacaggatttaagctagtaacgactttttggaacattactaaattttgttgcacctcctctcatttatgggttgtattggatatatctaccaagtgatcgtttttgaaatgcaaatgtgttatttatcaccatgtcaacattttatggggaactacgcatggttctttggctccattcattgttggaacgctgtgcatgcattatttgttcaatctaaaatatgaaaaaactacagttaatagcaactactgttgagatctatcatcttctgcttcgaataaactacagaaatgccaacttggggaaggacaggattaacgtttgtttcgaacgcttttttgtcttgggtagatcggagattccctcgtaggaattccctgcagtattaactccgagatttcgaagaggaattcatgtttaactctatatagtatccatggctagaagcttacagtcggaaagaataaaaataccaggcaacttttttcctttccggcacagcagttccccacagaggtgattcttgttagagcttacttttcgatcctaaaattaataatcataatcagagcttgaattataaaatcctgtaacaaccaccactcctcaaattagcatcggctgctggaaggacccaatgaaaagtaattagtagttggtaatttcctaaaaagaatataaagtttagggaagactgtcatgcaagaaaatgttgcaataaacacaattaggaccgaactgcgtcaaactgctagccatgttatctcaaaaataatgtcttcgcacagttttcaattccatcaacaccgattgaaacaaccttataattgattttcatatttcctaacacgacaaggacaatacatggctcccgatgcaatacagcaattagcttcacctccgcgagaatatattgttttcattaatggtttaaaaaaaagtttcttctgccaagtgatataagaaaggacctcagagcttatgctagcactcgctttctattaacatgtcaaatgttacagtccgtcttatagcaaccagagataatgagagtatatgcatctgatataataagttcctgctggttcagtgaacaaacctgaaatccaatcttttatttccatcgtcagtcgtctctattgtgtatctgagtttttcctcctcagtgaaggcattccaaatcttatccttttgcttattacgataaatgtaataaaacttcgtgaaaagacaggccgcaatagtcccgaatgcgataccaatcaaagcatcgttacctttgtgatagagcggtttatccggcgttctgtaaatatttgcggaaacaataccggcagcttgtgagtaaatgtttaccatagccgccgagacagcgcgtgtcctcactgaatttgaatttgcagagcaccaacttatactgagaggccatataggtgcgtgtcccaataaaaccgttagcaaggcgtatgttccccaggtgttcacttgagagccaggccagaaccttagaggaaagagacatgccaaaatccatattggagttcccattataataagtgacctctggtttactatttcagaaaaatatccagctagcaacatggtgatgacagagagaacattatatggaatcgacagcgcgtttgttttgtaagtactaaacccaagctttcgaagagtcaaagtcatataggtgctcactggtgatgatccaatatcccccaggaatctcactatatatattggcagcagatcataatccaacagtgttttgaggagctccttagggctgactggttgacgattatgcatatctcccttagtcggatcgtccctcaatactctgtttacgacaattttttcctcccgatcagtgtaccatccttttttcctataccatgcttttgtttgggcaggtgatgggggcattttcaagaaagacatgatgccaatcagcaatgtgaaaagaccttcaaccagaaatagccatctccaagactggttcatgagtccacccgttttaattttcaatagaccaaaagaaagcaaactggaccaaactgatgtcatagggttagcgatgtagaatagagaaagcctgaaaggtaattccttggaggtaaagaaatagctcatccaaaggcaaacatcgcaaatgaatcctccctgtaatgcccctaaaagtgcccttgtcgcataaaacccagattttgtagtcatggaagcttgacataccgacacaatactccaaaggcacatttgcgttggaatccaaacatcagcaccaatttttttggaaataagctgcgatggaagttcggcagctaggaaacaaaccagattgattgtattcgctgtattataatcatttgttgtcaaattcaggttttccaacatattgtcagaaagggcttgcgatatattacttctatcaaaatcgagcgcggtaaacataagaaacgtccaaaaggtaacgtaccagtcattttttttaatcacacgcttttcttctttccgagtccacgtaaaatctggatcaaacaagtggcgacactcatattgagagttctcatatatcgatgaataataattagcgatttccggatctgcgaaaacattacttgaagcatcgatacttgaatcagtgctcaactgctcaatgtcttcagtaatatattgtttatcctcatcgcttttttgttccacttcctgctgagagattaactggcgtattcccattgtgattgcactgctagattagttcagagaaagacaaggtaattttaggaatactacgaagaatgccgagttttataattcattcggtattttaagacctctcttaggatttccatgccaatatcaacagtactgagtatcatttgacttcgagcactattcgttagtctcgtcttcacagttttgacttttcttggttttaagtatggctttatcggaagacaccacgtcttcaccgtcgaaaaaatagtcatgtttaccccttgagatctagcaacgcttagagctttggcggctcttcagcgtaagcaaacgaatccagtcacagcattccaattctgcaggatgattttcttgctagcatagccgttcttgttttacattatcttccaaatcaattcctgctggaaaagtatcggcggaagcccataggcacctaatacgcttgacacttatcacgcttcaagatttccgagagtgtgggtccttcagagattttagagcaaaatatcttgaacagacataatctctggctaatagcgctttcattttgcaatacaaccaaatgacctttagccacatcacgaccgtcgataagaacggtggacatgctctagagagttacttgatttaaaatgtaccaatgtattaagagtttccttagaagtgtttgggtgaccctcgaggtcttcatcaaattgaaggacgcatctttgttttcctcttgaaatttcttagctgcttcttaggcaaacttcttgaatgcacagtaagtctccatatcgtcagtttaaaaaccaccttaagctacgggattcaactcctttcaacaaagatgtacctaaagttagtccattgatcagctacaaacgcaatatgctgaggcctaaaagctcattctgtgaaatgctttacagcatggatgatcacccttgtgataggcaagttggtccaacttttattattaacatctcatatttttgaagatacttcctattatcttcatcatataaggaaggcgtaggtaaccgacttgaattgatcaccaagatttgaaatctttcttttttctaatgcgtctataatacttctataaacatgcgttaaggtccatgactttcctactttccttaacccaatctcttgtcgtcgtagctcacgtattcaccgttcaattcgttaggaattccctggagggctaaattagcataaactcttgctggaattttgacatctaaaagaaccccattggctttgaaatcgttgaataacttttgtgcttccggtgtcataccactagggccatagttctccctaatgctatcttgcatgctagtatctaccacacctggagccacggcgatggccttgacgccatcacactcttttgaaatggtgagcgccaaatgatttaaagctgcctttgacgcaccataagcaccccaaccactgaaccacatgttgcaggcatcagagctgacgagaaccaagtttccctggcttttaatcaagtgtggcatagccagtgtggccagagaaagcacactgaagaaattcacatcgaataattgcttccagccatcaacgtcagccttttgtacagtttggacaggttccaatacaccggcattagcaacaacagcatcaatcttaccggtcttgtttaatgcctcttgtactaatgcactagcagcatttttatctgtaacatcaccaaccacatagaagaacttgtcaccaaactgttctttcaaacttttcaatgaactttcggacctagcgataccggttacaacggcattctctccagcaccaataatctgttccactatggatctaccaatacctcttgacacaccagttacaatcacagatttaaccattttttatcggcttgatgcagtctaagctgagccggatactacgctactatcttcttgtagttcaaagactatcttatatatgtggaatttcaactaattgtaacctcgtcccagtgatgtccatcttcgtatggctgactaagactcaatgtgttattaaatcacgcatttcttctatatagatggcatttctgggaagttcatgaaaataaattccctttgtcacgaactgaactggcatatgacctcgagctaataataaacataccttcaattcatgagtagtggcagttacgataatattaatatatgatgaagtctcagttccaactagatctggaaaggaacacataatgaggtattattgacctagcgtagaaacatttgttgtaatgaaccaaggttcgattgcttgtgaaagaatacgaattgatagctaggagcactaatatttgatcattgatcttatcctgggggatacagatacttataagtttggatctcctacaaatagtccttaactgtggttatgtcttcaacaatagtctttactagtcagtgatctttatgacttagaaggtccttgggcacatgaaatgtaacttcataacttatgaaggtaattgtcctgaagagagtttgaacaattttacccgaacaagaatttcaggatccgtgatagtttaatggttagaatgggcgcttgtcgcgtgccagatcggggttcaattccccgtcgcggagttgtactatttttgtttcgattaacgtcgagatgtgggatttgattagtcctcgctagtactgataattctcattacctaccctaaagtaatgccctgttctttttttttacatgatgtctgtcacaatagttctttctgaaatttcttcatcctctgttggatgggtgcacgtcttttaaaccaggcattacccaacgcattaatagcgggatagctaagtgaaatacacttttatgaaagccattataattaaagtccgttattttatttatgaatttggaaacagttattctatataaagttcgtttaccgaccaaacttcacattttaaaacatcagtgtcgaagagaaatttgattttaatatcttcttgcacttgaaatagggtccctaaatttcattgtacatctttcgtttttttctttcctgttattatccggatgttattttagctgcattaactcttcaaatcttggtgtgtggtacccgaaggtacaactatcttgcgcgggcgagctgtctaatgaatgccattgatgagaaaagaaaagtgtcagctctacgatagcatcaaattcatctcccaatcacgatatacagaataccaactatcgccagattccccattccttttacgcctccaaacttcaaacatgatttgtctagcaccccaatacgatcccatcccactggacgctagagtagccgcccatttcctaaattcttcttgagtctccaattttgtactggcacaaccagcaacgaatccttgccatatgagaggcactattctaacttttttgaatagtatcaaattactcatcagtttaagatgtgttaaaaccttctccacatacatttgtaaagatgaatgattcaaatccttgaccatagtatggtaatagatgaataaaccgtaataaaaactggatgtatgatgatggagaccttcaattgtatcattgataaattcctctgatccttctttgagacacttccattctgatctccacttgaaaagacgtttctcgaacctttgacaaagacttgcgaaatgccttggagtggtcatatttttcaatctgtagtattctttgtgtcttgcaagtttaacacagtcggaaaataagagaatcaacgattgaggtaatccataaagtgcatccgtgctcatgatatcttctacagtgaccattctttcatctgaatacgcataactttcactggcaatatttttgaaaataggagtgcttacagagctactctgtgccatattactatccttaacgaatcctatttgaattttaccatcatatttgacaaattccctaaaagatccttcttcagaaccgctaacgggacttgggtctcttagtgtattgaaatcaaagccctgttgtccatcatcattagtatcccgatctttattttcatcatcgttaatctcttgatccgtgacctggtctagagcggtgctatcttgaattaattttagaaaagagaaaattctgtgcaaagttttagccttttcggaaatctttggtcttgctttcattctagccttaacgaaattttcacaaatcgttaggtgttgttggcaatcagccatggtcccccatactacatcgatagaattcatggaaagaatcgcggtcaacacgtctttatacctttcttgtttaactgtattactgagacatattttgagaaaagaggaggcctgcttcctaaattcgatccccaaattgagataaaattgcatctccggtgaattcttcacgaatttactctgtagattaaagcaggaaaccgctagcagggcatttagcaaagaattgcgagaattggcagtataacccataccagctaaatcacctacagctttcaaagctctcgggaaatatagttttttccaaggattttgattcagagcgactactgtcatgagatctgcaacatttttatagtagtaattcaacagaaatcgagtcaatccatgtatttggactcctgtagtgggtaactgtaaaaaaggattttgagagccaggaacgttaaagattctaggatctggtaattgcgaatctacaacttccatagcaggcttaggcatcttagaatctaataacgtgcagtctatatcgatttgattccccaatggtacaattggctccatactggaatctttatgcgaaggtgtagcaactttttccacatcgagtgacggatgcctatgaaatagaagacgtaatgcccgtgataatgctgcatcatcaccactagtggagaaaaaatcatttggttcttgaatcgcactaccgataccttcatctaatggcgctgtattatcttcaaattgaagatccataatggggaagccttgaagtgcagatgctgaaagtaatgcatcatctctcaattcttttgaaatccactcatgattattgggagttgcataagtcatatcgagtatttcttgctcatccataactggggctgtagatggaacagaagcaggtgccgtctgtgaattagaagattcaatagctggttcttgccgttcaaccggtttttccatctttctcctctttcccttattcttaccgtaattcaaaagtgcatcatcagtacctttaaatacgccaaatttctttataatccaagtcctgttatcagcaattttctccaatggtgggttgtgaagcgtacttaattcatcatccatgtcttcataaaattcgtactcttcatcatatctaacaaaatcaatatttcttctctgatactgaggttcatcgttactggcaccgctggtattgtcctgtgcgttaccttgcgctgctgatatgggtacaccaaattcgtcaaactgaagaggcttggaccatcgcagcttaatatcataaccaccacatactaatcctgatttttcacacctctgacaatgaggacgtcgaagatcacatttgactttccttgatctacatgtccaacaacccgtaaaagtcttacctctcttcgactttgtgccatttttcagtctatttccatgatgaggatttactaccagatctgacactcctgtagtagatgttcgtgttcttctctccatgtctttctatatattcactccagcctttaaagctgtcttttctaagtcatgtcaaggtcggtatcaactacattttttctcataagctcttgaaatggaagtcatcgacgaagtaaggcgtgtacgaaaaaggacctattctaacgtttaaagcctcgataaacttgatggtaaagagtagcttagatggtatcattgatcatagttaccaatgcgttggtgaaggggctagatgctggtcctgtcacgtgatctgactagaaaccgcatcttctccatttaacttacttctctgattgattatgtctatcttatacagcatgagttctctcttccgtatgtccatcaacctttcttcgtcttttcatctaactctatctttttgtattcaccctgttcgtcttcatctttaacgagaaacctcaaatgaagaagaacccaaaccataagaccgtcttgttttaacaactgaaaggatctcaggtaaaccagggaaagctatgtcaagaaaattgaagagaaccaaccttttcgcgaaggatgtgagttcattgctctatgcctatggtgatgtttctcagcccttaccggagactgtacagtgtttagatgaattggtatcaggatacttggttgatgtatgctcatctgcatttagagctgctcaaaattgtcaaagaaataaactcaagttggaagactttaggtttgcggtacgacgtgatcctattaaattaggtagagctgaagatctagttgctactaataaattaattactgaggcaaagaaacagtttaatggttctgatagtagttcattaaagagatttaaagacggagagggaaatgatttagaaggtgaaggtgaagatgaggattatgaagattatgacgatgaggcggatgaagatgccgctggtggtggtaacacgcatttggacgatgatgataagcacatggattcagaaattcaccataaatctaagggcaacattgataattcttttgaagatgataatgaattgcatcaggtgaaaagtgagaagaaatcaaaatcatcaactcgtggcggcaaacaaggtagcagaggcggtagtaagacaagaggtaaaagacaaaaaagaggcacaagtggcacgtaaaaaaaaaaaagcaacaacgaattttatgtatatatgtataaattattctaccaggtatttaagttgtatactacaggattttcctcttcccaattccagtatcttgcccccacaaatgaattccacatgctgtttactaccgatagaaccaaagtgtataaattccttggtaaatcgagatagcttctaaagatgaacttaaaggcttcacaaacattgtggatttcggtatgccaagcttttacccatacattggtcttaggttcatcactgcctttagaatttgtctctggtaactttaaatctgcaaaaactggtccacttggtttctggctctccgatacttggtctatacttttactgatactttgtaccgattcactaatagatctactagctctacccagcagcttgaagaaattgttttgcttgaagaacgaagcaattttaccaccttccagtctcacattgtacattttttcaaaattattaacagactcgatggatttcgataatctatcaaaagtattgaagagtgcaatcagctcgtatttggttaatttatccacaacatgttgcttggaattttcattactttcatctagttcaaaaagaatttttaaactggttgcgtaacctgtggtttgaactttaccccacattctacatctatcacagtgaacacagtccataatctgtgttacgttcttgaaacgaattctaaaatcatctttcagttttgaactcaattcaccttcaaagattaaattttcattgaagactttactatccaattgtgataaaatgttcataatagtagctttcacacttggatcgtaggaatcacagaatttcaaatgatccaaatatggttttatcttccaaagtgcctttgatacaacggcatagttaaaatacatgttggaaactctatctgggaaattaccaacacgggccatgaaaagatctaaatctggtccccatttaccggtctctgtgtttaaatgatcgttcgaaaggtgtgtgccgattgatgcatgtaaacctgataccaatctataaaatgcatccttggctagagattgaccagtttcaccttgtgaaaaacaattttcaccgtagatgcttgaccaaatttgtgaagattcttgaccaccataaccggtaaacctttcagggttagctgttaaatcaacaagtacagaaccttcaccgtgtagatcgttaatatcacaatattcaatatcaggttcaatcattctttgctttttattgttagcgcataggtcgtctaaaaatttacaatcttcttttaccgattcttcgtcgcttatagtttcattttcttgtaaaccacctaatacctcaggctgccaatattctggtaaactatcccagtcttccaccacatctaccgcacatgctctgttgacacaaaatccgttattttgattccaaaatggacattgcttgtaaagatgcaatctgaaatatttgaaaaaatcagtatggaccaaactaaccaaatccttccttatcttaccattgatctcattgatttcatcgaacgtcacatcacatgttggatttatcacttcacctttatcaatagtacaaaaataagttgaattcagtggaggtggtactggaggtggcactgcagatggaactacagatgtatttccaccaaaactaatacttctgggctctaagttattttcggtaacattctgggctcgagatccaactgccagcagagagacgagagataataaactactaccagctttcattttgtcactgactgaaaaccaattagtttatctaattactgttggcgtttgagtagttttcgtgggatgctttcgaaactttatgaacttatctcttcacttttatatcatatatgattctttcatttcttctttctctttctttttctcgctttttcttctgacgtgttacctccgagaaagttttgactacgatgattatgaatgattattcaaaataataatggatggttaaggagagtaccataataaatctgacagcctgtccaaatgcacataagctaaaatagatatcgtttaactagaaaattccaaatttaatttggctcttgaagcttttgtctcttaaatgacacgtaaatcacaaaatcaaggcggacatcgctgattttcggagcttttctttttctttttgtttttggttttttcattcccattgtattagacatatcctgcccttttctcatagtgaaagtaggatgtctaccgttgcaccgactctgtatttcttagcaatgcaaacgtcttctacaatttctggatccatttcggggaacatagatttcagtgttgatagcgtgtttctctgttctctatcttgtaacttctgtgcgagacgatcgatatcttgattatcttcatcgtaaagggcaacacttggtggacttgtatccgtgcgacgagcttcgtcctctggttttagttgtggtttagcactggtaaaaaattcgtttactttccccttgatggtgttggccgcttcatctaaaggttgtaagataaactgacttgggttcgggctcttggaaagacgagggttcacgatactattattttctctttctctctctgaaatttcatcttctttgattaattgcttttggttgtcatcataacgctgtttgaactggttcctattctctatggtaaatgtactttcattaatacttatgataaaacttacggcggcttgtagactgtttagataataaagggcttcacctctgaagaaggactcaaacctaaatctttcgatatacctcgtattggaagctaatgagcttaaattactctttaaaattgtatagatgagtaaaggtatgaaactgtcagcgccattttccaatttgttgttagttaacatcgccataatgattttacaagaattaagaacacagatcatcttatcacgaggtgctttaaaatgattaaccttgtttaattctttcccggataattcaaccaatttgttcaatttatctgataataaattggggatatccaattcttggggtgagataaacctgtattccctcgatttcaattttaattgacgatcatcttttaaatcctgtaaatgttctttgtccaaactctgttccaacggctcaagacatggtgagaagcatcgagcataaagtttgcccataatcaatttttctaaaccttcttgtgcattcctcaatttggaaccctctagttcacaaaatggtttataaagcccaaatttatcatatatgaagattttaaaatcatttatcaattttgattgttccttagcagtccaaagaactcttacagtttggaaatcgtgtaaaaaggacttaataaatctcactataggttcagcatgggggtctcggagctgttgaataaataattgaaaatcataaaaaggctcttcatcttcatctccatcatccttttctcctacagtggcacttctattggtagattcttctacagttctctcttctcccgccgtattttggtccttaggactggtttcggcttgagttaaagggtcaaattcactcaaatcttgcttaatgttactcattgttcccaaaaactagttgtgttgagtattctacagtggcttgcaagtccttacggcaaaggactactggtaattgaccactgagagtttgttcttcatacaagttcggtttgtcttgagttcaagaaagtgaagctaagaacaagcggtttatcgagacaaagacatgtacatcagtttcaagatataacatcagttctccatgtgcggtattctcttacattatgcaacaaatcaaaacttttgtaatgaactattagaattcgaagaaggtttccaaggttcgaaaagcggcagttcaaactcatcacagatatttaatgcgatagtgccgtatgttgccgccagaggtcccaacttctcatctttaagagtttctaaagagcattgtattagttggttttcctctgttttatcccttagagaacctttcatcagacaaagtgttgaagttggtgatagatatatcttgcagtttaatggtgaattgtacaatgaagaaattttggacaatgatacaagtttcgtggcatcactgctggaaaatgacaagatgagtgtttttgaagttatatccttccttgaaggtgaatttgcatataccatttatgatatgcatgagcataaattgtattttggtagagatgatattggtaagagaagtttaagttaccgcttggatcaagcgattggtgacatctatgtggcaagtgttactgggcaacaagaaggttttacggattgtttggcaggaatagtgtatatttatgatgtagaagacaaatctttgaaccaacagatgctaccaatcctcaatcgtgaagtatccagtgaaatcattgaagatgaagacgaatttcaaagaattacacatgcactctatgagcaactaaaatctgctatagttaaaagggttgaatctatccatccaatgcatctagaaaattccccaatcgccgttttattctctggagggttagactgttctgtgatagcggcaatgatatgtcagcagctagagaatcagccttctagacgcacagtagaattgttaaatgtcagttttgaaaattatcgtacgggactttcacctcatgatacgcctgacagaaaactagctgttaaaagtgccaacgctttaaaacagttgttccctagtgttgacataaagttggtcgaaattgatgtaccatatgaaacgtacgaggaacatagaccgaaagtcatcgatttgatgtatccaaaaaatactgaaatggatttatccatttccattgcattctatttcgcctccaaaggttcaggatatattgattgcggaaacggtcaaaggaaaaagtaccaaagacagggtatcgttttgttcagtggattgggggcagatgaattgtacggtggttactataaatttgccaggaaatccacagatgaactagtagaagagttaacgaggcagattaataacatttacaacagaaacctaaatcgtgatgataaagtaatagctgccaacggtgttgaggttcggtacccatttcttgatagacatgtgatagaattttcgatgcagagtatccccatcaattggaagatcaataaattgatattgaggaaattggcgcttgaaaaattgaatttaaattccatctcagaggaacccaaaagagctattcaattcggatctaaaagtgctaaaatgaccaaggatggtaatagacatgggacagatgttttgaaataataattcaacagttcaaatatccgatatactttgcagcttgttcaaaattaaatgcgaccaatagagtaaaccctttgaacatgcaaagtttagtaatttcagttaaaatatcctcagaatttttatcatccaccacaaatattagtatattatcatcgcttctctgaagtggtaacatacgtctggagatgtactctgtataaagtttatggtaggtcaaagttaaaaacaaaacagatctattttttatgagataatcatagtaaatcttgttacctccagtggaagaaacatatctccaattagtattctttaaatgatttaacagtggattcgccttttgggttgtattgactaaaaccgacttaccggtgttagaaactcttatgggagccgcacctgatgtttcttcatttgtattgctatcaccagtagcagacctctgttgattgaacgaacttatcacttcattgctccttacatctttgcttggctccacttgctccgttgtacgctgctgttgatgtttcttggacgaattttcatcaccactaccgttttgatctctcaacctcttgacaccagcaagaatagactggaaagaagtagtatcagtattattcattgcgtcagggtccttttctttgtaccgatcttaatattatttcgtatcaagaagcccttgttgaaaaaaactgtctgaagacccattagtttaaactcttcattggaatacaaaggataaagcgataataagcaacaatgtcatctcaaagaagtacgtatagaaattgatgttattgtcaatcatttccgaaattatcagctactaactaagatgtgtttcttatttctccagtcgatttaaccaaattaggacccgaacagctggccgctgtcaaacaacaaattgatcaagagtttcagcatttcaatcaatcattgcaagcattaacgctagctagaaatagatttcaagattgtatcgaagatataaaatcaatttccagtcctgaaaacaaggatcaaaagataatggttccagcatcagcatcgctatacatccctggtaagattgtggagaatgataaatttatggtagatgtagggacaggatactatgtggaaaagactgatacagaagctatgtcgttctacgagcataagattcaaaaactgaataaagaatcggttcagattcaaaatattatcaaagaaaagacaagtgcatctttagccattgaagcccacattagacaagccgcaatgagccagcatcaggaagcacttaagcaacagcaagcgcagcaacctactaatgctaattgattttggatgtaaattttgtattgtatgtgttttttatgtattttttttattttttcatcaacttttttcctgaacgcataataaagtgaaaaatttcaagctcatctcatctcatctcatctaactactactacaataaagtgattactacaggaaacactgggatcaagtgctgtaaagatcaatatggctaaaaagaagaatcagccttcttctaagttacgtaagagagctcaaaatgctcttgaattagcccaaaatgagcttggtgaaagtgattactctgatgacgaaagtgcttacaatagtggtagaagaggtgtgctgaatatttcaaggaggggccaagatgaagatgaatttgaaggctctgaaaacggtgaggaaagttttgaagacgaagatttggattctgatgaggcactaggatcagatgacgaatatgatgtgatgaattccaagttttctcagactattcgtgataagcagaagaataaaaataggaatcaagaacctgagggtgattctgatgaggagtacacttcgatcgatgaagcagatttgttaccattgtctgcagtttgggataaagcgggtaatgacgatgatgatggagattcgagctcaggtgcagaagaaaatagcaatggtaagttagaacttcaaaatgagaatgagatcgatggtgatgatgatgatgatgatgatgaaggtgatgaatcagagagctctcaagaatctggttctgaggagaaccccttcgacgaagttcctcaagatgatgatgatgaagtagaattaaacaacgtcacttcaggtttaatgaaggaaggagacaagcaggaatacaaaagactaaacaattacggtacgggcaaagaaaatgaatatgcactaccgtctgctacttcggttagcggtagtaataaactgaatttggccgacatgataggcgttgttgatgataaggaagctgctgccaaggccactttggttcaagacaattcttcgacgttgtcagtgcctcttcctcaaagaattcaacaaagacatgaacgtaaggcagcttacgaaatctctaaggatgagatggataaatggaaggatgttgtacagcaaaaccgcagagctgaacatttggattttgctagtggtcgttcagtacctgataacacatcatctactttcactaggtctgcaggacaaccacagacagaattagaagaaaaagttgacaaagtcttacagaatagtaatttagtggatccggtgaaaaattctacctttgaagaattggcaacagccaagatgtcaccagaagatatgaagaagaaaaccagagaaatgagattaatgagagaactaatgttccgtgaggagagaaaggctaagaggttaaagaagataaaatccaagacttaccgccgtatcaagaagaaggaaatgttgaaaaatagggaactagcaggtgtggatgaagaatctgatgaagatgccgatgttgctagagccaaagaaagaatgactcttaaacatagagctaactccaagtgggcaaaagaaatggtaaaacacggtatgacaaacgatgccgagactagggaagaaatggaggaaatgctgcgacaaggtgagcgtctaaataccaaggttttagaccacgattcagaagaggatgaccctaacctaagcgatattgaaagagaagaggagaaggagcaatcacagggtacctccggagagaagctcggtaagtctggtattatggatatggctttcatgaagacagccgaagctagagagaaggatgagaatagaaaaacaatggaagctctcagagccgctgaagtatctggtaatgtagatgaagaaagtgacgatgagaaagctgcaaatgtagaattaaaccaggggagaaggatatacaattctgttgcgtctgtaaattcgaagcaagaacgagccaaaaagtccggtgataaacctaatggtaagaagcaagtaaaagatggagaagtcgaagtccgttatgaagaacctgaacagcaagaagctcgtaatggaaaagagtctgaagacaaaaagactgagtctgttaatccatggttagcaacaggtgatgaagaggatgaaagtacagttaaacattcttcaaaagtttcagtcgttgacaaagatagtacgaaggcagcaaagaacctctacaagatcgagaagaaggggaagcgtaattctaaggctgctgatgctgatgaagatctattgctagatgctgatgatcaacaccatatgacattccaaacggaggacttaacacccaacttcatgttcaaacaacaagacgttgttgcagaggcgtttgctggtgatgatgtagtgaccagttttgatgatgataagaaaagagtagcagaaagtgaagatgacaaggaggaagatgtgacattgccaggatggggtcaatgggcaggtgctggttccaatccaaaaaagaagagaaaatttgttaaaaagatcaaggggaccgttgagaagaataagaggaaggataagaatctacaaaacgttattattaatgaaaaattgaacaaaaagaacctcaagtatcaatcctccgcggttccattccctttcgagagcaaagaacaatacgaaagatctctacgtatgccattgggttcagaatggacttcaagctctgctcatcaaaagatgatcaaaccaagaatattgaccaaaccttcggaagttatcgatcctttaaaggctcctttcaagtaaaatgtacattagtagggaaacataaaacatatgggggacccggcgccgcttgggcagaatcagatttatacatatttactagtataccttcataatgcatccaatctatcgttgatttcttgtgcagttaattttctaaagcgagggcctttatcacctggaacacccttgtaacctaacagatccttgttctcatcaccgataactgctatttcaattgtatctccgttaaattcaccctctacagattcctttaacgtgagaagcactgtatggatggcatcttccaattcaagttcttcgttccatcttttctctaagaaagtctttgcagcagtagaacccttccctatagctgtagccttccaggggaaataagatccggacggatctacctgatatagcccaaaacctgtatgttcgtcataaccggcgaccaaaagagatgcaccatatggtctaacaccacccgattgagtagcttcttgcatgattttagcaatttcagaaaccagaagttttgttggtggatactcaccataaattctcttataatgtgtgtgcgccactttccttgatttatccactagaactctgtaatcaggacccataccggaatagacagttccaatgtttggtgttatttgtgaaattttattcaatgtttcagtgagagccaatggagatgaagatttcttctctgtggcaatgacaacaccatttgtagctttaacaccaatagaggttacaccttgcttcaccgctgtaaaggcataatcgatctgtcccaatttaccattgggtgagaaggtggttagggaaaatgaatacctgtcagccatatttctgatctgaaaaatccaaaagagacttcaatgggttacaattgaacctatttgacccttcttgatggtatatctttaaggtttttaactatgatgaacctttaaagttgagcttcctttgccaccgcgaagtttgaactcttagatttatatcgttttatacgcaggaggaaaagtagtatagtcttaaaatacaattaacgatatttagaaatatgaattttccaataatggtggtagtgatttttgtacaatcttggaatcctggatattaatttcctgaaggtcccatctctctaaaaaaattttaagtgaagttatagcttcgagagaactgaagttaacgatgagcctgatattctgattgtcatgatgttttagctcgaatacttgaatactgcatactcatagtttatccatttctttatttttttctatttcttatttgtttttatcagcttttagacctttttgtttcaaattgccaatgtttagcttgtgatttctctaaatcgattctaatcttagtggaaggtcttctaacatgcataaagttgcaatcgccacctctttcacaagtgcctaaatcatgtttcctacaaacggcctctctaaaatcggcgacatgtgttaaatcacagtaaagtggtctttcatcaaaccacctcgtattaaaattgtttttagcatcctcagcatcttgttccctttcgtaatacaaataaacatttccctttaagtggtcattacgattctcacagataaccatagatcgtactggaccaaatctacatgcttccatatagatgtcttcatacagcgcatcaaagtcttgtggatcgattccttcaggagagaagttaaccatgttatagatgagaatcgtgtgtgacttaacaggtcgagtatgtcttttggaacacttatcaccgtggcggcaagctccaatcttgtagtaaaaatggctgataacaggttagtatacattcagatgatatgaaaaaaaaaaggttagagtgtgtaaggatccacataccatttcctattgtcctcgttgttcgacatttgagcttctttttgtctgttcttagtagtggtgattaaacaagagctcatcttaaaaatcgatgctcatcgcctttcataaaccatcaaacaaattaaccaaacaccatgggagtatgtaaagagaaacggttaattctttagcaaagttcatggatcactaacctcatatatagaatgatggtggtacgattaataaggtgcacaggctgcagctaactgcagaaccagatcgttctaaatcaccagctgaacaagatttaagacaattccaagatgcttctatatggacatgctgcagacttacaaataagaggctccgattgcctctggtcagtgattttaagggaaatcttttgaacaaggaatcagtattagaatggttactgacaccagaaagggaagattttaatcaggaacagatcaaacagtttgctcatatcaagaggctaaacgatgtagttgacttaaagggcattcaagagacagaaaacgggttccagtgtgaatttagtggtgatgaactaggcaagacaaatgttaaattcatatatttaactctttgtggagatgttttgcctaagagctctctagggcttagtactaagaaaaaccattgtcccaaatgtgaatccccctatgaagatttagatgtaatcaccctcaatccttcaaaccgggaattagaatcgttacaagaaagaatgcataaacttgaagagttgaatctccatcacaacggaaagacgagatcgaagaaaagaaagagaacagccaagagtgctgaacataataataccaaaagacctaaggattccagcgaaacctaaagattataattatatatatatatatataaaggcgaaactttgtcatctatatacagggttttcttaatgagtttattcagcagaagatgcagcaccttccaaatcacgcttttcgtcagcttctagctgttgggtcactttctgttcgtatttcttaccattctgatacatagtataacccaaactacccatcatccatgcagatccaccgattagagttaaaaccgtcagacggtggactgcatctgttacttttgtgtaccaagggtatctggccatctttgaaacgactctaaatggattctggaagcggaaatggtccagtctatgtgagctatcttgtcttgatagttgttgaagaagttcagtaagagcggcctcatcgaaatatcaaaggtcctgtcgtaagccatgacccctaacctacatgaacaaggacactacaaagagtaatagggatattgagaacgtttctcaagcaatcgctgtaatatttcgaatttctcaaatccagttatcacaaataaaattcgtacaaatgaagttacatatttcatactcatgggtcattattgtcttaccgctaaggcagcaggtacacgcgaaaataaattcttaacattattggtccatctctcataccatggctgttcttgtactcctagcatcagattagttttttctcttaccagtttcaccaattcatccttggacattgtggcagtcgaagcaccaccactcattttcttcaaataattctttaaatcttccacggaccaagaattgaaatcatccttaaccttcttaccaaggcctgaggcccaactttgggtgtttttactcaaagttttagcgttagtactaactgatttgtagtaatcattcccttgaacttcaccagattttctttgggcccaattcttcaggctgtgataccatgcaccatcggtcaattggtcatacttctcctgtgcctttttcaatggcttatttctgacctctcttaccaatgcacgcagttgttcattcgttgcaattttactgtagcttacaccgcgtgcatctagaaactcagtaattttacctcttggccaactatccaaatcaattaggaaagtgtcgttgatcacatccccaactttattttgaacagaattgaaagcacttcctaaattcaaaagagtcttatcccatactgaacaaacgtagtcaggagacttactcaaaaatggtgaagaatgtctttgagccgcttctaagaaccattgaatatcatcttttagtaattccttttgatccgaagctaaagccgctaacgcatcgcgcttttcttcgatatcatcattgtacggaatcttatggctgttcaaccatttccttagatcttcagcagaccagtgttcgaaaacgtccttcttgatatctcctgcagaatcgagcagttctctatttgccaaatccaacgacttcaaagcgtttaaccttttttcttcagcagctttggatacgtgatagatgttttccctcactttgtccaacaattcatcattattttcttcgaatggcacttcaaagtcttgtaaccaagatttgaaatcatctgctgtccagtgttcgaaataggatgaagatggatagaatccagaagtatccaatttctctgaaatcgagtaaaaatggtcttttatatacttgatcaactgatctttagtagcgcctggatgggggtgaatcccattctttttgagaaatgcgtgtagcctttccattggccatgtctcaaataaccaatcagtaactggttgcgatgagccagtcacagaactttgactgggccaaaactgccaccatggttttttactgccagtttgtccgggccatgcttctgataaggtttccttcaactcttcataagtttttgaacttaatttttccaaactcctttgctgatccttgatataactcttcaaatcgctatgggtccaactatcaaagatagatccatctgcaataacgtttgcaacgtttgcgctcactgcaagtgaataaagaatactaatacttggcttcatacttaaaaaaccttattctcacgatggtttagaagtgtagtttgctctagtccatctcatccctaccctttagacttttcaagtgtatatatatatatgtatgtatatatttatatatccgataatgtctcccatcctttaagagcaatgataaattccgctgggcaaccgatcagttctacccttatttgaaaaaaaaaaaaaaaaaaaaaaaaaaaaaaatgttaattgagttaaccaagcaattcaaaccggtgcccttcctccctttagatcgccaactaccattttagtatcttgctggatagtgtcctagtgctctatccttcttgtatgggcatggatatgtgcagggactgtagtaggacaatgaggcgctatagacaacaagtaccccaaagctctgcaatccactgttagtacgggatgagtagtagatatctaagaaacagatagatttaaatgaatatgaaattagttagtctcgtcgacatatccgttggacagaacactacgtagtagaacaaggtatagtacaagagatgggaagctatagagaatactatgtatgcttgcaaagtgaggtctcttattaagactacagtgagggggaggagaagttataaaggattcaagagacatttttttcccatcttgcgttacctactcagagctctcgtaccacactcaaatatcctccctcccccgtaatttttatgggcttgagccttgatgcagtagtacttgagttgtagactatggctcaccagttcagcattctttgtagatacggcccttcgactctttaactgtgaatctttcacttaacatgcaattgacatggaacgctctgttgaaatttaaacacttatcaatacattaaacactaaaaagatacaaaagttgacaaacgcaagctattgttcgccagttatgagtgcgtatgctgctaatcattcacctacacctcacagtgtgacggatacctccataccaggtgttcctagcggcggtggtgaagatgaagttgacatgaataacatgtttatgcaactagttcctcaaccgattagagtcactagaaatcaatcgaatggggttgcagcaagcaaatcgttgcagttctctctagcaaacttgaacgttttccaaaatttgccaaaggagacttctcgtggtgttgatgatttgactagaatgaagatggcaatcctaagtggtataccagaggaagttaaatgggcactcaagaaatatttagcttacagtaataaggctccttacatgattagtctcaaggatttgcccaatcttttgccccttttcactaatttcattcaggatatggagccattggttgaaaagtttaatacgccagtattgggtgatgttaaatgcatggaaaaattgcagactggtttgaacagtctgctaattgtaaggaatttggctcaggatacggattccgtccaagtactagtgtcagacacgacaatcaaaaattttattcttttcgttctacaaaaattcgaattagtagcagatggtgattcaagctggcagatttatgactctaatgtttcgttctttagtgagctctgtcactatgcattggatctaatggaggctatttcctcttacattgcacctgcaaagaaggatgatttgtatttccaaactttggtctctgtgttgaattacacaaaggaccgttacatggtgatttctatccttagatctctttcacgtctattggtgagatcgaaagctgatgaggaaagtgctgctgataatttagacgaaaggaccttatcgctaatcgtctcatttttgattgtggagtgcgatagtgaattaatcatcgcatcgctggatttcttgtatcaatacattttacctggtgctcaaagaatttcaattcttttggatgatcctcacagatttgctactctaggtgcagtgttaccaagattattgacttataacattaaggaaccagaatatgatgtgttagagaattttgaagttaaattagtgaaaagattaagaccacctgcacctagtagtgctccagacttgccgccatctttgttcgaacaattgttggcattgaatgaacctatgagatcgacagcctggttaaggtgttgtttccagcccgtagttgatgcagaatttactcagataagtctttggagagcttatgaatcaaaatttgcccaacccgttcgtgaatctgggagaaaattgttaccagcggtagaatttatcaagaatgtatccaatgcctttagcgaggcatctgctatggttattaccgattctactacaggtaagaaaagattcgttatgaagggaattcaaccaaggccgaaagccttgagtatcaatgaaggtgaatacgctgcaaaaaactccttgccaccattacaatcaaagtttttggatgattcttcgaacatcacaccagcaagacaggaagaattaccagatattaagtttcctacaaaattatctgaagtctctaaggcaacttcgacgtttctctgtttactctctaatgaatcaagtggtcccggtgtggatttctgcagagtcatcaagccagtggtgttgcataaacttgctgatattccacctttgagttatgccctttcggagtacatggagaatacgccaggagtgtgatgatcaatgcttaaaaattgtaatttttgatagatgtatgtactatagaaaccaacaaagaaccagtcaatttggggtgaggctaataaagtcatattatattatattatgacacaatagcctatgaataaagaaaaaggctaataagaaaaaagattttaaaaaaaaaattaaataaaaaaaacagtcgacccacatgtactagatcaacttctcttaatcgtaatcatcatcatataaaagtaaaaaactaaaaaaatctcgtatttcaaatatgtttatcatgaaccctaacgggcagctttttgaataggttaatgtgcccaatttattgtttattccacatgttgcaataagatccttaatccaaaacgtaatcatagcattaataataataattcaaagtttgttttcattcattaccgatttaaatctgcgaattttgtccacagcttctgaatcctctttatttgcataaaaattctcaatctcattagttagctccaataaactgtccgaattgtaatggaacatcaaatcgttttccagataaagtgactgagcgcttgggttcaaatatatgctctccaccatattgttgaaaagtgtatcaatagcgtacgggttgacattttgccagatatccaataacttcttcatgtcattcaacgttacaaaaggttgttttaagaataccttgaacctgaaaaagttttgtaatttcaataagaactcatccctaatatcttcattttcaacatcaacaaaattaatggcatcttgaatattattcaacatttgttccaacagttcagctttaacagcagatttcgcactttcaccgacattgaatggttccgtatgggaaacaatgtcatatagcgcaagcatgccgctgaaggttgattgagttgataagagatttgctaattgtaaagtgttctcgggagcatcgtagtatccaatttccctagtgaaactctgtaggaaaagaccaaacgtgtacaaatccaaagtcttgtgtggagttttcgcatttgcagaattgattaaatgcacagcttcatcaacttgcccattattgatcaagtattcactttggatgtctatagagctagacccaaggtgatccttgaatttttcgaacaactgattatactgcgtatattcaccacatcgtatgcatgattttagtagaatttccatgtctaaaaccgggcagctcttgttgaactggagtatagtttcgtaatctttcaactggtataattgactgtagatgtattcaatagaagccttgtattctgcctgcactgcaatactcataaacgcctttgggaaatcagtaacttcaatccacttgtaaatgtcagcgtttttggctaatctcaataaagattcatctttcaagaaaggtagaatttgggaactgaattgtgggtttaatagtacaaggtcctgtaacttatcatgaggagctctaattactgtcagatttgtcaaatatttttgctcctctttatcagggcacaactccaaactggatttgatgatatgactatcgacaaacttagcagatattagttctttgtaggtatcgtaatcaaaacaatagccctccaacagtagcttctgatactctttgatgcctgttctgactgagtttctaataactgaacccaatgaaagatggtaggatttatcccaatcgcctggatggttataaaatgccatgacatcttctgcaacattagttagctttatggcttgtaccacaacaccaggaactttagcaggatccaaattgagtctcttgtaattggttgccaatttggaaaatctctccatagttttttctctaaattctgccaaagagtcattgtctagttcgctgcagtaagtgtcaaaatcgtaaagtttagtgattaaaatggcgtgtatttccatgttgaaagcatatttgtcgatagtttgaggcgatccccaaagacttgtcatacaaccgatgagaccaccatagttcaccactctagaatcggatagatttaaattacgacaaaggtccacgaagaattccatttctgtgactttttttagaataacttgggaggggaaatgttgaacaataccatttaagaagtcgtacttctccacgttactgattgattccgcgtcttttatcacattaccttgagctttaacaaaccttaacaagtattcatcggggcaacgaatctccttcagataggcaaagatgaatgggtacaatgcagtatcaaatctgaattttttgattatggattcttcaatcaatttcataatgatttcactatcctttagctgcaatgaataatccattaaagagcttaaaactgattccacacccattggataaagtaaatattccgacaatttatttctgtgattacctctaaactggcatttcattggatagagacatgagtagatttttttggtcagtttccaatcttcaaaactgtttgccattaataccagataaaattcataggaaaattccggtacccatttcaatttatggaattgagcccatagattgtaagctttatgacaatttaatttggataccgatagtaggaaattggatagtaatagcgaaacgttttctgaagaacctgacacatttcttaaatcctgcattagtctatccaataattttatggccaactccaattcaccagtttccacaagtccagagactgtcatcgaataaacctcgaattcaccttctttcaacagtggatctgaacttaaggctaatctgtactcttcatataatgattcaattgctccgggatcattcattgtcttagcataagataataatgcaacgtagtagaacgaatctgactttgcatttgaatttttatcgagtatacgttgagcctgaacgagcgacatgtgacccggaaaaagattcatcgccaacaaggcgtgatctaaaactgatttcgataataggtgcgatccaccaccaatagtgtgaaataattcagccgctatcttgtagaagtccacgccattagagttatgagtgacgtatgcggcaatagaagctttgaaaagacactctaggaccgtattatagatcctgtcagatggtttcaaccgattcataataagatcttgataacaggtaagtagttctgcgattttataatccaaatcatcgttatcgaattgacgtcttgccactgaatctaaaatttgttcgtaaacctttagtggtggaataatatcatttctctttaaagcttgataaagtgagttaatcgaatttaaatcaccattttcataacacttattgatttggtcggtatgtgttcttaaaaatgtatccttattaagacaaggttccttatcctcttcccaggggctcatcgaatcgcgctgcttagataaaaactgttgatccaattgtgctggacgaccattatcgacaacattatcttctttggcaacgttatcagctgcaacttttgcatctttccctgccggtaccacaggctgtgattccggcggtattctataatgggagtgaatgtcactttccttgcgagatgtatttgtcgttgagtaatacctctgtgaaagcgtatgatctatgaatgcatctttggcgcctgtacgaagagaaagtgttgctgtattttcacccatacttctcctgcgtagagctgcaggagatctggtttggtgatggctcgaaatagatgcagatctttgcctcctaccattgtaagtatcagtattgctaccctttgattcacgctgatgggaatgttgattaacgttaccgttattttcatattgctctctcaattgttcctctcttctctcatctgcagtttcataatcctgtaagacatcatcaacaatattgaaattgacattagcaccaataacaggatgtggacccagatgcggtaaatgtgatggtggtacagcagaatcaacagctactaagccctggttttgacgtagatattgatacgagctgtcgaaaaaagctgttgcaggcttttgagatgcactgtgatagccctttgtatagaatttatatttgaaggacttgaatgccattgcagatattatcgtatcttgactccttcagtttaaaccatgaaataaataagaagcgttcacttcagtaactaaagaacaccagttatcttattcacagatatcaacgttcgagcatgaaaccacgtcctcacgtcttgattacctagatattatggttcttattctcgtagtcaaatagtactcttctaattggtgataataatgatgagtcgattgaatctttttttttttttcactgggggaagacacgtcggtaggtaagattaacctattaataagcggtggtgtaagggtataggtaccgattcggatagccgtattcttccttttaaactttcgaagaaaaccgctcggatggcggcgaaaaaagtttcttttcctgtggggtgaaaagaaatgccataaaatccaatgcagggcagttagagtatatgtggcagtgggctagtagggttgaaagttgcaacggcgttaagttagaggtgttgtgcagtagccaatgtagtgccctattctatgttatacaatgctacaatggacgatatactctatttttacccgttgctcgcttctcccggtcttccttcactccgtttgcccctccccctcacccagacaccacccccgcgctttaatgtcccgagtatgaaattgaccgtggggtctgcagccgtggttgctagcggattagcgtaccgctcctgaagaattagagacggaaagagcgacgtgcccgggatcggacatagacacggaggttaagaagaccgaattatactagtcgtcccgcatggcactatggtaggtgattgacgttaaagctaattgattttaaagaaaaaaaaaaaaaaaaccagctagtagcatagttgtattatacagcgaatatattgcatatatcaaatatcactattcactgttttacagaatagttacgtctaaatttgtcatcgatcgaagttaagtagtaggcgcctggtgcaactaaatcgattgaaccttttggttcgaaacttttctttagatgggcctcttcacgtagatgaatagcagcttcgtattgttctggagtttccactgctcttgagttcaatttgttatccaaatctaatagcttgttaatgtgagaaacgtcacccacgactttcaaggagaataatgatgcagctaacccagaaccgtaggaaaatagaccaacgcgcttaccttgtaatttttcggaaccaacgtaatacaacaatgacgctagagaagcataaagggaaccagtgtacatgttaccggtgttggttggaacaatcaatgatggttgcacacgttcttgacacaattgtttggtagcaccaacaaatgttttttcgatggatttatctgtcaaagacttttcatagtcgaccttggccaaattagagtcgacttcagggtacaattcaggtttggcgcggaaatcgtcgtacagaagacgtgcataagatttggtaaccaatttacatgttggcacgtggaaaatgttataatcgaaatgattcttcacaccaatagattctggacttagtgggtccttagctaaacccctggcaatggctttcttagagtaagaacggtaaacttggtcaacagccttcacgtaacatgtaagggaaaagtgaccatccacataggggtactcgctggtaaaatctggcttgtagaaatcgtaagcatgttccatgtaactagcacggacattatcaaagacaagtggtgcatcaggaccaatccataatgctacagtaccggcaccaccggttggtctggcagcacccttgtcgtaaatggcaatatcaccacagacaacaatggcatcacgaccatcccatgcgtttgattcaatccagttaatagagttgaaaagggcgttggtaccaccgtaacaagcattatatgtatcaataccctccaaatcattattaccttcaaatagttgggtcaagacagtcttgacagcttttgccttatctagtaaagtttcagtaccgacttccaaacgaccgacactgtgaggatcaatgccgtagttctttagtagtcgggaacaaactgtcaaagacatagaataaatatcttctctatcgttaacgtatgacatcttggtttgacccaatccgatagtatacttaccagctgagacgccatccttcttttccaattcttcttgagaaacacattgtgagggaatgtagatttcaatacctttgataccaacgttctgcggcttacctggatgttgaacggtcttctgtttcttagtttctgtcattatggaagaaaaaaccttttacctttttttatcttcttattggcgggaagctcttttgttctcttaaaagattccctaaatctctgttgctacacttacctttatataatctgagttgaactgtattccatgttaatttgacttgtcctatttctttatttgcagcgttgccgcgcgtacaacgcgtccaacagcgcattcttatcgtttaattaaggaaaataaaaaaataagaaaaaattttaaacgaaactgactgccccgaattctgtggagtttctgtttctccattttatatgtgcgcgtagtgtagcggttaatcatagggaaactcctcttgtgttcgaaccacacacgaagtaatgatcgatcgagtacattcaatctaacaatatttcactaacatttgcatttcttccaccatgatgtgctctagtgaaaactgctagagctttatttcgatatcttgttatccttaaattattacaacgtgcccaatcacgtgtagcggtggaaccatgaaaaatccttttaaggtctattcatatgtgtatatattacaaacttcatctatcaaagaaatctcacctcctagggagaaacctagtcctcttgagaaagatttccgccatggacggtgatgagagtccacatagtgctcttctagcgttgcccgcagagattttaatcaatattttaagccatttagatgagaaggatttatacgtcttacaagaggtttgctccagattaagaagattggttaatgatgaagagttgtggaagaatctgttcatatcgcaaattcacactaattattttccatcctttgcgcagaccccaaaatatagtatcgaatatgtggatcgtcagcagggtttgagacaatggggtcataatagagctattaagacgaagtatgttattgcaccatcgccaaggtttgaagttcagatagaaagtatgatatttgattatccacgttgtgcatgttataacgatggtgttattacggtagtgcaactgcatcaaaggcgtaagaaagatcgtttagtctatattccctgtactacacctcaaggttgctctactatgcattttaacattaactccgccgtatttggaagattcgacggtagggtctttggtaaattgttgagtaataaatcgtatctgacccccgtgacagaatttaatgcaaggcacacccactgcgtcacggcgatagctgcgtcttcatcacaagatttttcagaggattggtgtgcaagtggatcagcgaatggtgaacttatgtggtggtgtgagacaaaattagtgaaagatatcagagtctcgaacagacccattcaacgattggctctctataagaattggacaatagcattagatgacgacaggatatacgtaattcatgccatggatcaagttcattctttggctcttccgagagttcaaaatgaagctggtgctgaagtcccattaaacgttcaatttctgaaagtcgattttggtgccaagtggttggtaatggcagacttaaagggcctatatgtgatagcatttgatcccgaacagaattttgggcacacgagatgtttgcaaatacaggaaggtatatctaatgtagtagcagatgaatctacatgtcgaagagaacaaaattccaattttgctggtggtgatggttgttttattgcagttataactgcagataattcagtcaaggtaattaatattcgtgcaccgggcaatgtcctaaaagtcaacacacatttgcattttgataaagaggttcatacatgtcaagtgacaaatttggtggtagtctgtgccctggcgggtagtttgcagatctttgatgctgccagtggtgaactggtaaaagttgtgcaaaagacagataaggatccccagtttctaggtctctcacaggggagaatggtagtcgccagtcggaacgtaattcaatatttgcaatatgttccagaggagagaattaacaaaaaccgtactggcagcagtagtaggggacagaacatcaaatgggagaaagaggtcagtttaggcatggatatttatgacgaagaagaacagataagacaagaaaccgcagaaagaaaccggaagctattggaggattatggaggtgatatgagtgaagaggaactccatctgagaatagcgttgatggaatctgagtccgtggccgaacgacccgtccaacagggacaggaagagaatgacgatgcagatgaagagctcaggagagccttagaagaatctcgtcgtcagcatgaacacgaagaattactcaatagctttgctgatgatgacgatgatgattttagagatgcattgggacaatctttagcggcggaaagacggcgtaatcctagggccaggttgcgccataatacacctgaaagtagaacacacgaagacacaagcacccatacgaataatgacacccaacaacagttagaccagcatcaacagcaacaacagcaacagcaacaacagcaacaacagacagacgatgaagaggcattacagttagccatagcactttctttaagtgagatgagttaaccttacataaaagcataatcaaaaaaaagagaaaaaagtttttgggcaccaaatacaattatatgtaatggaaatcaaaataagtgtatcgattatccggtagtgatgatattaatggtatatagaatgtcttcagaatacaaagacctggtcattaccttcggattcttcaccgctgaatctccaaccaatgttgttagccaactctagaactagactgttcatatcaggaggaccgcagataagtaacctgtgatcaacagatggcgatggcaaacatctttgcatcatttcttttgtaacatagcctctaagacctttccaattgctggatggtctgttaaccacgtaatttacttcgaaatggggatatttatccaccaactcatccaattcatccttgagcaaaatgtcattttcagtttcattagcatacagcagagaaatttttgttacatcttctggtgtggtgataatttcgttcaagacttgtagaatgggggttatgccgctaccaccagctactagaccgattgctgtagaggaattgcagtaatagtttagtttaccaactggccccataaaatccacagttttcccaggctctaaacctgcaaaaaatttagaaactttgccgtcgacataagatttaaccatcaggtcaaaatatccaggagcataacgaggagaaattggatggtaaggtcttatttcttcagtaccattgatgaaagcacgggccattagatggtagcctggtggcaaattcaaagtttcaacagatgtgttcaatttaaatctatagatcgcagtattcttggagacaatggttttgtcctctaattccaatggtgaccatctatcagaataaattgatcttttacgactataggcagcataagctctataggccagaaaagaaaataaaacaggtaatgtgtacagcagtctgttctctcctgacatgtacaccgttatactgatacctgcaaggaataaaccagtgggaatatatataccatggacaggttcatctaatatgttttttccaactaaaacatctgccatcttgattcaaaacctgaatatgtcgagccactgtctgtaatcaaagctcaaccagtggatttttactcaaaactcccaggtaacttgatcttcgatgacctttctttagtaatggtattttttttcacttgtccttccacatgtcggcctctccattgtgaaaaacataataaaaatatacagaaaataataacagaataatagtaaaaaataattcttacttaaagctctataatcctcagtgatccgcctgttctatatcttgctcatccacgataccgttacggatacaccaatctttgtttgccaagaagactccatctggatcctgttcacgtcttattctttgccaattcttcaaatcttggccataccactttcgtacgcttttagccatacctctcatttcatagtcatcgtactcagtttcaggcttgttctgcttttccaatagagaggtcgacccaatgaagttcttggcccagtgtggtttaccttcggcagcggccatggtatcttcgaacaatgcataccagcggcccacggcggagttccagtgaaatggtctgtacatggtagcattaatgtataaagtcagttgattgttagtcacatcactcaaaggtgcatagcgacaatgagatggggtattgtccaagtaagggcgcaaagtgttaccgtgaataggtcctggacttgtggaagtacggtcttccacattaagcggtttgtctggtgtagtggtattagagcagcgaacctcaatggggacatgaacgtagaattccttattttgtgctgcttgcatgatagaatgatctaatgaacgtaagacttcaggaccattctctaaggggcacccccattcatcaacaaattgtgagaaaagacagtccatgtttaatccatcgacagatttggagacttccacttcaccttgaccaaaagtttccacttgaccgtattgtctgtgaaatacaaatctttcaatgtagggtgttaggggggaatagatctgcgtagccacccagaggagtgtttcatagaagtatctacccactagagttccccaccaagattttcttggtatggttacaggctcctgggtcttgatcccacgccagagaatacatttacgagcgtagggataccaccaaattctaatatattccgatgaagtccaaatggtatcccatttatcaagcaaagtatcaaatttgatcaattcttcagtggatcttaagttgaacttaggtactgcacgtattgttgctttgacaataacacctattttacccagtgataataaagcagctttaaagacatctggttggtgttcggaatccaagaaaaccacgtcacccttaccattgacaatagtcaagttcacgtattgtgaagacactaatccatggtaaggtgacgacccatgggtaccggtagagatgattccccctacactttgttcagagattgatcctaaattttgaatagcataacccttttgttccaaatattcacttaattgataaaccctcatacctgcttcgacggtaacatcagcatatttcttcctgggatgttctttcaattccaataccttattgaatcgatctagattcattaaccattcgtttgtcatacacatatcactaggggagtgaccagaccccacggtgactaaggtcttcctctcctgtctagcagccttcactaccttcacaatttcatctacagacgttggttggaagtataactgcgatctacatgaatagatacctgcccagtttttaaatacgaaccccctcctgggagctacgcttaaaaagtcgaagagcattaccatcgccgtcctagcttcgaggaatgttaaaggcttaagctattcagtcactagtgatttttattttagcaattttataccattgttaatcttgagaaattgcaccatggcttcgaatggtgagcatatcacgtgatgtaaagaggtatcaagagatgactagttattgacaaagtccgcctcgaagattaattagaataatctccttttcaatggccctttacttttgcctcacagcgatccagtaattcttgtcatttttgatcatcaacagctattggacatttcggactccgaagcgatgagcgatgagcttgatgagttcaaacaaagcatttgaacaagtactttaataagagtatgggaaaattggctgaaatatgttgtcgggtggttgctcaagaacttagctggcttagttttgctgaggctagatatataattgagaatttaccaagtgctcaatgtgtagaactcgtttggcagcatttatgtcaaaatatgaaagattcaaaaactctatatctattaatgcaaaaccaccctttaatcgccggagaattggattctacaggttggtatgggcacaaaattagctatcgtagacagtcggtgccgaatttggatcttgtagaatcgataaggttcttcaatacacttgaagggcatgccaattatcaatttcttaccattctagaattacagaacgatatgcctggattagaatcactggtaaatttaccttcgttagtggaattatcggtagctggtatcagcaggcctgaacagctagtaacatcgtggcatagagctttaaaagtggattcaaggcgttggagtcaattaaaggtactaaatgtccctcaattgacgagtccacgactgtttttcgattcttggcaattgataccttcattgctctggatgggtgtaaatttagacgggaagaccattggaaatataccaaaattaaatcaattggttatagaggctcccataaaggctcctatggaaattttatgttggctacaggagtggcaaactatggaaatcgatggtaaagtcatgatagagttagatgtaaatccaaatcttgtaataccttctataccaagttacttccccttggaggctagattctcgaagctacctggtacatatggatacatgcgccgattgacaaataaacgcacagaaatccctgaacaagatgaggttgaacgtccaaaaacgaaacgaccaaaacatcgtggaatcagaaggggggcttcactgcaacggtttttcggatggggaggactataaactaaggtcatctcgtcggggtataaacgatatataaatcaaaggcatattttctatatagtaattttgattttgattttttttcttattcaaatttaatcgaggtgagaataaagaggaagccattataataattatgatgatgataataataataattattcgatgagtgtaacgccttagaagtttagcgctgtattaaaatatagtaagacaaataaaaatcacggaaaccaaacaacaaaggataacaaaaaatcttgaattgaactgaaatcgaggataaaaaaaaattgataaaaaaaatttgagcataggaatgattaaaactcttcgtcagcataagagtcagcaccaacctcgatgtagtctctctcaagagcagctaaatcttctctggcttctgtgaattcaccttcttccataccttcaccaacataccagtgaacaaaggcacgtttagagtacattaagtcaaacttcctgtcaatacgtttccaagcgtcagcaattgcagttgtgttagaaagcatacaaacagctcttttaaccgaagatagttgggatgctggggtagcggtaggtggttcgtaacaaataccaattttgaaacccgtggggcaccagtccaccatttgtacggtcttcttatttttaacttgcgaaactgcattctgcacatctcgtgtaaccacatcacctctgtacaaaagacatgtagccatatatttacctgttcttggatcacatttgaccatttgattgcccggttcaaagcaagcattagtaatctctgagacagagttagcctcgtgataggccttactcttagacaaaattggtgcataagacactagggggaagtgaattcttgggtatggaaccaaattggtttgaaattcgtttaaatcgacgttcaaagaaccatcgaatcttagggaagcagtgaccgatgacaccacttgtgcaatcaaattgttcaagttagcaaagctggggcgaccaatgtccaagttctttttacacatatcgtaaatggcttcattatccaccatgaaggtacaatctgcgtgttctaaagtagtatgggtcgttaaaacggtattataaggttccaccacagatgtagagacttgaggtgctggatatacggcaaattccaacttagacttcttaccataatcaatggataattgttctagaagtaaagaacctagaccagaacctgtaccaccacccaatgagtgtgtaaataggaaaccctgtaatccatcacattgatcggaaatctttctaattctatccaaaatatcgtccaataattctctacccacggtataatgacctcttgcataattgtttgctgcatcctctttaccgttaatcaattgttctggatggaaaagatccttataaggaccagtacgaacttcgtcaataacatttggctctaaatctacgtaaactgcacgagggacatatttaccagatccagtttcgtagaaaaaagtggaaaacccttcttcaccacctttaggcttggataatccctcttgtagatacccatcaggtctgataccatgttctagagaatacaactcccaacaggagttaccgatttgacaaccagcctgaccgactaaattaaattgagttagtaacgcgtctaattaacaagcttatacttgatggatgggaagaagagtttggttccatcccaattcatcattattgcaacacataccgttgatactaataacttcacgcatattctatatggctcagtccgcttataaaggtccttccaagcttccagagctggttcttgttgttcttgaagtggttggtttagtgatcaatccgcgagatctgtggcaattcggaccttgtttactttatgtccacaaaaagaaggtggatcaaaacaccgggtaacatcagtatagtggtcgctctgtacgaattgttattcttcgcacaagacctaaaccggcataccccgatagttcgattagccgccgatgttttgtccctgtaaataccttggtagacgtacatctttgatacggataaatatgattttgttattccttaagtttatctgaactaagaatgggataacaatatattttatttagtaagatgaaaataattcgaatcatagatttagaatgtgaacttgttaaatgctgactccaaaatgaataatatgagcattgacgtagcaattcattatggaaaaatgcctgctatctctttttttctttcttaagttttacctctctttataggattctatattttatattttgtaattcaaactatgctttgagcgttaaatgatataatatgttacatgagcgaccgtattcaataagaacaaatatttatttagagtgtaataataataataatttacaaatggagaagtgaaggatcaataatgatgtttctatcgttacacttgctccattgtagaagaggcagtatcactattcgtactgctttgtgaagggacattcctgtacttagaaggatcaatttcatcatgatatttctctgagacttcttctagagtcattctcttggtttctggaatcaaaagtgacactaagagaccaagtaacatgaaaagagcaaaaatttccataacatggttcaaccagcagttcgttggtttgttatcctttgcacaattatggttaatcaaagtacctagagcagtttgagcaatgatggcaccaaccttaccagcagcagcagagagaccatgggctgtagatctgtatctcgttgggaaaatttcacctggaatcaaaaaggtagtagtgttaggaccaaagttttggaagaattcgcaaatgatgtaaagacccaataattctttaccactcaaattatgataatcaaacccaatgatacagaaaatgacagttaaaatgaaaaatccaaataattgaattggctttctaccgataatatcaacggtgaaaacggtaaaccagtaaccaggtaaagaaccaccgcagattaagatcaagttaccaacagcagtatcgtgaagcttttgataaatagatcccttaccagaataaccaatagcatttaaaatgacagctgtgtttaaattcaacccgtaaactgcaacatccaaacagaaccaagaaaaggcagtaccgaacagaattttaccatatttccattgaccaaaatggtggcagaaatccttaaaggatgcctttggtagagcgttctcaacgggaacatcaactctgacaggtgcttcggaagaatctgaaattccttcgtaagggtgctcttgagcggcagctacaacagcagtagggtttctctgcaaacgttcaatatcattttgagcagcttcaccttgagtaccagacacaaatttcgaggcatctgcaacacctctagcagcatcaaattccacatcaagggtataacgaggagattcagggatagttaaacggaagtaaagagcgatacaacctggaacacatcccataccgatcaaaattctccacatttgatcacatgctcgtttacaacttggaccacaggtactaccacttttagcggctttcaaatcatccttgtaaccttctacaagaatcaatgcaactatacctgcagccacttggccgaatgcttgattagcaaagacagcactcataatcgcacctctccacttagtagtagaaaattccgaagtaataatggaagacaatggataatcaccaccaataccaatacccatgatgatacggaaaaaagtcataattgcagtaaagttcaccgctggtgaagccccgataacacactgcataatacatgcagctatcatgataattaactcaacaccgtaaatcttcttacgtcccaaaacatcagctaatataccaaacccgaattgaccaataaccgtaccgacagatgtcgaaaccttcaaaagagtttcactagacgatggaatgttaccatccttccaatacacataagtcatcatgctaacacccaagttaatcgcaaaaatatcataggaatctgttagaaatcctacacccgctaccatgatggcacgaatatggtaccaaccaaaggaagcttcatcgattttttgtaatgccaatctacgcctttccaatgggtcttcaatatgtgcaaaatcattaatgtagttatggaaagcggcgttaccacccgttgtcatattcttggctgtttcctcgacatgaatatcctctttttctgacattcttccagagtttatgttattagttgttattactattaaaaagcctgcttcttgttggttgctttcctatgaatcaaagctaaaccaaatcataccaagctgaagatctataccagtctcttgcaccttttataccaatcctcttgtaaatctcttcaaaagacaccattaattatcaacgtgggcccatatgccccgctccctactattgcatcctttcattattacttacagcatgcccaaggccatatgccactatcatttcaaattagctaattctgccatactttggcacagaaaccctgttgcctgggactaattaacctagcacgcccctcgtggccatcagaaaaataattagacactaatcttcagccgcacgatgagtgcgtacaacaacaattcttccacgaccgtagtggcaagaatgaccattcgatgcgttcatagacatcattagccatgttgttcggacatgattattacccacattcttcctctcttttcattactttgattgctgttgcgcgaacttataccgaaagggaatcccacgtggagaagactaagttgaaaaaagaatcattcgtaataattactacgataaccgtcgatagtagcgatatttcattcttcgaacgattagcggcaaagtaatgaactctatctgaataaaatatggtgaaagaaactaattgtatataagaaacataaaaaaaaaaaaagaaagattagagtccgacattgttcacttggcgtagaagtaaatcgctgagacaatagttaataaaaccgtcaacgccatattaaatttgtactcctcgttttgttcgattggaagtattttttcgtcttgcttgaaacgttcttgtgccttggtatagtaaatcgtttcctttggtttggcaccatttggtaatttgtcctggtacatctcctcgatatgttgttcgattctggcaacctgaatgttaacttttagataatttggatcctgcactggtacacgcgatttgatatcacgcacgtagtgacggaaaattgagaggcatccatgcaaggtatgactctttaggattaactcacacgtagtacccttacgaattttaaccctatctgtcaacactttttcattattgaagacgagcgctaaggtggctatagccataacttggggaatagcgcagaattgaaacgtggattgttcgttaattgatgaaaggtaagtgaaaacgtctatcacatgagaaagggcatttagcaccaattcattaatacagcttagaccattttgtgcattgcgtggatcacctaaatcaggcaatttttcagcgtatttggaccaaatttcacgtggccaaaacgatctaccatcacccaaatcctccgcgtaatctctaatgatatttgtcttttgtaagaaaagacccatactttcgtacagttgtggattggcgtccaaatcaggcgtaccaaacccagcctctacgatcaaatgagtcaaaccttcaccaaccagtccggcgacgtaatgacagtaaagatcgtagtccttaacagtttggacaccttgcaagttgaactgttcatccaatatatagtctgccataccattacccatcttgacagtaatatcttgaatcacttggcggtattttgggcgcaattcatggtattggtgtaggatacaggggaattccaccaaaactttgcgatctttctcctcaggtgagttaccatcaaatgaccagtccctggtatccagtttttctgcaaacgaacgtaaaaccttaacctttagctggggttcgatggtcatatcatcttcaacagtgtctaacgctctaagaatcaaataaaacagcatgacagcatcacgtagttcagggttcaactcttgaatgacggctgcaaaagatcttgaagttgctttcaacaattcataacatctcgtcaattccggggaagcgatatctcgaggagcgtataacggttgtctaatgaattttagctttagtgcagattttaattctactggatgtgatagcaattctaacgccttaaccatgacgattgactcaaattatgcttgcaatttgaccttgatctccgataatggaatgcacttgttgatgaacgtcctgtctgttatttcgaaggagcaaagggaaatcatcaccttaccttatcaaaatccagatcgttgtgtacggcgcgacggagtggattgtgtcacaatatacaataacaatcatgaatatttttgagaaatatcacagaggtcccattgagttcccaatacttggattggtctaagctgaattttctctaattttctatattttttgttttttttgtttttttttttgttttggtagtatcttttattattcgagatgcgaatgaacataagctctattatatcatttattatttacaagatgtccgattctctcccatgcagttttaaaacttttagtttgcaaaatttccaattctcgctcatcaaacttcgacaagacgtagtcggataccactgtagaatctctttgaggtggtctaccgataccgaccgataatctatagaaattatcatttctccaacaattttgtatacttttcaatccattatggccacgtaaacttgttcccggctttcgtaactgcactttacccaatggtaagcttaattcatcatggagtacaacatgtgtcacatggtcgcgatgaggtagtctattccacatcgggactacagtcttgccgcttaaattcatgtagtcaccatcagatctaatcattaccaattgtgacgagatctgacagtatttagcaggtgaaagtgaagagaccttgtatggatgaatttgttccgcatcaaaacgatttttcaatagatctaaaatgattaaaccaacattatgccttgtacctgcatacttcggttcaggattgccaataccggtgaaacaggtaaggcgacgacgaaatcgcagcatctttatcaatagcgttgtgttactgctggagaaaccattattctttgattcttgtacatgcgatggtagtaatttgaaaaggcgagcgataccaatactaagcagttgaactgataaaggttactaaggataaagataacaaaagaagagagggaaagggaacggaaatgtcatctaataatcgaaagaaactgctgctaatgggccgttcaggttcaggtaaatcatccatgagatctattatctttagtaattattctgcgtttgatacacgtcgattaggtgcaacgattgatgtggagcattcaaatcgtagatttttaggtaatatgactttaaacctatgggattgcggtggtcaagatgtatttatggaaaactatttcacaaggcagaaggatcatatcttccaaatggtgcaagttctcatacatgtatttgacgttgaatcacaagaagttattaaagatattgaaatttttaccaaagcattaaaacaattgaagaaatattcaccagatgccaaaatatttgtcctattgcacaagatggatctagttcaactggataaaagagaagaattgttccaattaatgatgaagaaattgcaagaaacatcctcagaatacgggttccccaacctaattgggtttccaacatcaatatgggatgaaagtttatacaaggcatggtcacaaatcgtttgttcgttaatccctaatatggctgtacatcaatccaatttgaaaaaattgaaaagcgtaatgaatgcatgggagatagtactttttgaaaggtcaacatttttagtggtttgttcgagtaatgcagttaatggtgaaacgttggatccaaaaagatttgaaaaaatatcaaatataatgaaaaatttcaaacaaagttgtaccaaattgaaaagcggattcaaaactttggttcttaatgaaaatatctacgtcagtgaaatctcacaaaatatggtttgctttatagttttgaacaactcagaggaacctcaaagtatggtattggagaatattcgtatggcgaaagaattcttccaataatcaaagcaaactttatacatatatatgtatacgcacagataactatcaactatgcacatataccaataaaacaaatcgtaccatataaatatatatataaaaaaaaaaaatatttccacgaactttggtcctttgtccttgttccattttttttccctctctttttctcttaatattcaatagaattgaaacgcccataataataataaaaaattccaccacaatcaaaagtaaaataaaataaaaagtcttgaaaaaagtcttggatgaccaaataagggagatgttttcccatatgcaaaaaaaaacctatctattatttgtcttattattattattagtattatcactgttattatattaccattagttttcattaatcttcacctgttgtaacctttatatcttgtttcttaacgttacccatccttttccttaaaatatcaccgactttttcagtttgtagagtgtcttccattaaaaccccattaattgaattttggaaagattctcttctcatcaaagatggactgctgttagaaaaactgccgccacccgctctatgagaacttggttgactgttcacactgttttgagtacttgttctagagactctcgaacccaacggagaaaatcccatgtgatttgatgatgggaaaggactttcgtcttcctcgtcactcgaaaattcatcactcgattcaatctggaatgcagatctgcgtcttggttttgctaacttgttagctcttgccaaacctaacgcaggggcaggggcaggaggtgctgctgcctgcaagtgcgaagttgtcgagcgtgataaaacattgtttgagcatcttctaacgtttggattcaaattccccgagcttgctgtcgagtccttcctcgatctagtaccgttaccacatccgcatgacgaacacccgttcgaattacccgttgttgctgttgttgttttaaagggattcgaaaaatgcattggttggtgttgaggagctggacgcaaaaaagttgatgaggcggagtgtggtaacggtggtctagtgccactcgttggtgacgttgccatttcatccgaaagcatatcagcataggagtaaaatcttaaagtccttggcttggcatccatccctacactggcactgttactccttggcagtggaggtggcacaggttgctgctgctgctgctgttgctgctgctgctgctggtgttcttctcttagcgttgcatatgaattacttctcgttctgccgagggccaggtctaacccaatagtacttggctttctcatgtaaacgatatctagatcattaagatttgcagattcatctgcaataatagagcaagaagcatctaaagcaggtgcaacaaagttttctaaatgtcttctatgattaactgtaccagttcccggcaccaactcaggcgaatctaaaggactcccttgttgtgaaggcgaggaatgctgtgaagttctcggagtcctatgaccgcatcttgaggacgaagccgtaactgggatgccgacaccgcctgtactttgattgctatattttcttgataaaagacttacacttgaaccatgacgtgaaaaaggtctactactacaagcgtcttcaacagttctctcaaaaatcatggaagaattaccgttgtcactttggggggaagacgtaaacttgtactcgggaatagtagtggttccattcatgcccgtttcagtatagagctatagtacagtatagtatagtatggtatagcggagtatagtatagcggtagtatatcctatagtatagaagcagtagatgtcacttgccttggtatcgctttgtttttcttgatctcggttcttttctttgtatcaggcacaataggatctttttgttttcctatatatgcgtgtgtgttaaatatctatcgttttgtccaccgattgctcctttttttcgatgtccgacttcttgtgggtctaaagtctctgccttgttgtacttgtccagtttgtaaagtcgtatctttcgaattcgaactgattttatctcgttagacccacacacatgatttaggacgaatggccccgctgcccaaaactttttttatattggatttgaaaggaaggcaccaccacgcctttccatctgcgcagggaaataccaggggaaagcctcccttaccacgtactgccaaatgactacagattatttacgactatactggcaatagatgcctaccgtatcacggtatagtagtatttttccgtagggccatatgccatgatgccatacggtggcactgccgtatattagggagcgtcgtgccgtacgagccctcactcttggcacattacgcacggagtagggtgttggacacattgagtacgtgatatagttcatcccctagtgaaaacctaaaataaaaaaagtgctctgcgaccatgtcttaggaggcacagccaaacaactggtacgcatgcagcactctgaagaacgaagaatgaattttttatctctcattttaccgaaaccgtttctcttttgtttttagttttcgagaaaagaggagagagcaccacttacccaatgaggaaggtgatttttgtcgctcgagaggtatgcggtttttcttataagaggggaaaagtgacagttagacaccaagtcttttctgttccctcttaaacaatcatacaaacaaagtacaatgtacttgttgcagtatgatgagttcttgaaataaactgcgttatcgtacctaggccagtttaactactggtttgaagaggataaacattaacatacaaactctgactgcatatactattctcttgaatgaagaaagctatcgtcgattcttcaaagcttttcgctagcaggaatcgcttgattgaaggtaatccgtcgaagtactatccgtcaattgtgcgtggtagtagcagtgtaaaagagtttgtagagaggtggaagggacttgattctagtacgcgtaatgtcaatgaaagcttgcacggcagaatatgcggtgtgagaagtgctgggaaaaacatgtgttttctggatctgggcgggttgcaggttgtcatgaacagcaaagaaatggctgaacgtaacgatggcttgaacctggctcagcggtaccgagccggagattacgtattggtgagcgggcggcctggacttacggaaagacagcgtacgctttccattcgggcggagaagccgccgacggtgttagcggctgcacagcagccgctaccgccttctctggaggaccgcgccaagttaaagcagaaccgtgtattagactaccagctaagcggcgtagaaatgcttgtaacgagacataaagttactagggcggtccgtgaattcctcgatggacgcgacttcgtcgaagtcgaaactccaattctctctaacaaggccaatggtgcatctgcagaggcgtttgttacctattctaacgccttaccagagaatgaaaaaaggttagaactaagagttgctcctgaactttggttgaaaaggctcattatcggtggtttagaacgcgtctacgaactgggtaaagtcttcaggaacgaaggtatcgatgctacgcacaaccccgaatttactaccctagagttttaccaagcgtatgttactatggaggatctcatcgagaatgtgcgggacatgttggtgcacatttgttcggcggtaagcgggttgccgatggctcagcggcttctctcggagttgcaaacgaaggggttacagcggttagattttgtcgatacactctctaaggaaactggcacagattttcatggcatacaagattggtcgaatccggaattactgtgggaagccacaccaatcaaggacagaagtaagcttttccccgagggaccccaagcgttgtctccatcacagatgtggaacagattgggtggttactacgtggaagatcgtcattgtaatggtctttgtccgacgttagtttgtaaccatccttcaattatatctccgttggcaaagcctaatgacaatcggttatccaagagatttgagatgtttatcgggggtaaagagtatatcaatgcctacgaagaagaaaattgcccgcagagacaattgcagtcgttcaaagatcaagctcaaagcctcctacagtatggcgataaagaatcgttaagcgttgatgaagcgtatgtggaggctatgaaatgggggatgccgcctacgggaggcgttggcttgggtattgatcgattggtggcgctactgttgggcagtacgagaattgaggaagtactggcattcggatgccttgacgatgtaaatagacaataagtgagtaaacgaatgcgcgagtgagaaattacggaagttgcaataataataatagtaataatatttacaagactacctaccatacttgaagcaattctacgaggtctattctgccagatctcgggctgcttacctcttgcgcgacaccttgtctaacatcgtcacacatttggttgactgcacaactcaatacagcaacattatcttgaggtccagcttcttggatgtcgtcatgaattagttgtttgacatcaggtctactacttctaaattccacatgtggcaaatccttccttatacgatcgatgaagtcttgtgcatcaacaataatttcggcggtttcagtggttgcatccgcagctacagccttgtcatgtgataagatttcttcgatggcatcatctttagcgtcttctgaaatttcaatttgttttgccgtcgatgaactgtccttgctcgaaccatcgccattattacaatcgaatctatcaccgattttaaaatcagaatacttggtcacatagattatcggttgcacgtaatcaaattcttgtagtttcttcaattcagggtacagccaatctatactatgccaatgtctaatcacccagtaaaatttaacgtatttggtatgcgacttatcttgacgttttttctcattgatatctttaatgtattcgtacaatcctacgacgccgttaccgccagcgacgattaacacctgatcgtaggcgtaggcggttctgtattcaccataaaatgcctctaacagaattcgttcggtgcaacggccttctggcatactgcgcattttgttaattaacgttttcgttataccgtctttacctttgattagaaatttaatatcattaccatccatgattagtgaaaatggatgtgattgaaagaaaaaccaactatccaaaaaatgaacgtaaccaaatgaaccggtgttggcttcatcataggggccacgctaggtacagtcataacaacaatctcatcagatattagttctaaatgagcttgtcttatgccaaaggaggctatctttaaaaatctgagaaatctatcaaatacccaaactgcaccacatgcatatgcatattgaccacattctaaatctctgacgtgaatccacatgccaactaaccagaaaactgctaatataatatggcaaaagaggaagacatcataaagtttagctcttacataggggaagctttgtacgaaaatgacacccccactggtcattgcaattgctccccaaatccaccattcttccattttaattttgggtatagaatgagtccatttcataacttcaaacattgtaatagtatgaacaaaagctgaaaaaattgccatacgtgctaaccatttatggaatgcataaaatgttgacatcttccatcctgttaaccaaagtaaaaaattatcacgacctgcaaataggaaagctggtataacaataaaacatgtcaaaacagcactacggtcaccaacataccttgcaatctgtgctttcttactagtgtaccatgtaaacttgtcataatagtagatattaacactttcacccaatatgacaaacacaaagtagataaagatgactagagattcaaatcgcgtaggtataacaccaccaataaaatttctttctgtatgtttaccattaaataatgctggcatggtaacaagccttctaaaccatcttattggcgccaattggctaattctttgcttggttctcatcgacgcatgggggaaagctttactacctagatgttcaattgaacttacgagtaccaaaaacgcccagtatcccataagaccactaccccaccaccaaccgcggtgatagttaagataccatttgtctagagtcttgttagctgcaactgcatcatattgctgtgtttgagcttcacgaactaatgcgtactgagtcataatcgtcaattaacagctgcccaaattcttattacaatatgattaggttggattaacgttttatcaattcatgggcaaaggaatgacataaaggtattgagcacatatcttatcacatatcttccttcttatactccattctctacaccaatttgcttaaactaaattcatcttagaaaactctaaacaatagagaaagcccttacgatgaatttggaatgttgagaaacaaaaaaaaggaccaaaagaattcgggtgcacattgattgattaatgtttttatgagaaaaaggtaaagtagcaatagatatgaagtaattcgacctttaaaattcaaacggatgctggcggttgcagagacagttcatcgactgcgcgttaacggtgcgaacataaaaaaaagtaagacaggtgatgcatccgttccaatgtagccaagactggccaagaattatacttagacatggttgtagtactttcagtggtaaaactatcgtcacaatcatggtgcgcccagcatttactgccgttaaagcaccctcatcgatgcagtttcgcttaatgcaccccgaatgcggcttcactgttctttcggggtagttgaaaaagaggaaaaaagaatttggccaagcgttcttctaaggcgccctctcgttacaatgtatcgttgtgcgaatatcggtaggtgtaaggctaattatcgtctcgattgattgtgtttcatcttgaattaacctaccaggattgaagtagttcaatgaggtccagcgtaccggatcttcctttttttatcgaagtttcttcagcgacgatgcttctgatctggtcgcataccgccggatgtgcacaagtcataaccgcaacatgatcagatggttgtgtctcttgtagatcttgtattagcaattgattcaagtctggtctactaccgtaatgaatttcgcaagaattcaccaattcggactctaattttgatgagatcggaattgcctcttccgtagaattaactgtaatagaagtatccttagttttgtcacctttacttttttccaagtcttctgcagcctggtttacactgctgctactgttttcgtcaccactggggacgctcccaatggattgaaatttcgattgcggctgcgtcacgtaaatgatggggtgcacatactcgagcttttgcaattttatcaattctggtgcaagaacccttgtgtatgataaatctgggaccatccaataaaatttgacatatttgacgttatgatgttcttggttactgttagtgttgctgttgtggtcaacaacttctttgagatattctaatggactaatagcgcctgcaccacttgaaaacatcatcacttggtcatatccgcgtactggtttatattcaccgtagaatccttctagcataattttcattcgacttgtttggtcagcttttgaaatgagatcattataaagtctcttggttaaaccatttttgacagtaacttgaaatgcgatggaattactgttttcaatagtaataacgctaaatggatgagattggaaccaactgaagggtcctgttaaaaaatataagtaaccaaatgcacctggtttaggctttttatcccatacttgagcagaatcatcgatgattaccaaaagatgcttctcgtcagtaatagagacgtttgcatacctaataccgaagcaacctaatctgattagacgaatacatctatcaaatgcccaaactgatgccgccgcatatgcatattgtccatatcctagtaccgttagatggatgcagactccgattagaaagaatagagctaaaatgatgtgtccatataggaaaatttcataccagctacgtcttagaaatggtaatgattgtacaaccatgatgactccacaaataatagctacagatccccatctccaatattgtgtgtattttctaagatgaactgtatgcaaccagtaatcattgagcaacatggtaaacgtgtgcaccaaggatgatacaacagccatacgtgcaagccatctgtggaacgtcataaaagtcgattgacgccaaccggtcagccacagcaaaaaattgtttctaccggcaaacaagtacgtggggataatgataaacatggaaatgattgcactccgatcaccaacgtatctagtcaattgatcctttttctgtggccagtatatgttgtgtttgctagtctcatagttgacactttctcctataaaaaccaatgcaaaatagatgaagagtatcaaagactcaaatctagtgggaatgagcccgccaatcctgttatgcatgaggtgcttaccgcgcggcagcagcgtaggaattagcacatgaccacgtaaccatctaattggtgagaagcgatccaattgagatctaagcactaacgtagctctaggataaaaccttgtggaccaattgtttatactggcaattaacactagcaaaccccagtaccccatgagacctgccccccaatatcgagctctggcaaaattacgattccaaacctcattcgtttctttaacgtattccggattatttgacatgtccattctggatcctttactccctcttttccttgttttggtcttatgatggcggcaccattaagtaaatattcagtgcctttattgtaggagtaggtgcgtttatatagcatccagttgacatcacatattcaaacacatcgatattactttttgagacctcgagagatgcgaggcactgtatgtgcacctagatcgagcattagagctttgaattctcttttgttaagctcttttgagaattttatgagcattgcaacatgataagtagagaaggaaaaatgaacttatatcattaataacaatttgtcagttcgattcttgagggtagtagatcatttgcaattatgacgcgttatttctcgacacaaagaaaaaaaaatactcctacagttgacgcgagctgagctcatctctctcacactaaccatttaatcagaaacaagaagcaagactatgctgcctcctacagtagaattttgcaagggatctctgcattcaaagactttttattcaccagtccctgaacagattgcccaatgcaaagataacgatgataatgacaatgaaaacgaccaaattatacttggggttgatgaagcaggtaggggaccagtactcgggccaatggtttacggcataagctactgtacaaaacaatttcaagatgaaattctcaaaccaaactatggatttgatgattccaaaaaactgtcagatttggaacgtcgccgattgttcagtaaaatatacggagaaaatggagaagttgcagagatcgcaaatgttggatatgctgtaactgcgattacccctgctgatatatcaagcggtatgcttcgatatccagctaatgccaattataatctaaacgagcaggctcatgatgtcaccattgcattgatagaaggtgtattacagaggggtgtaaaactgcatcacgtttatgtggatactgtaggtccgccagcaagttatcaaaaaaaactagagcaaaaatttccccacattaaattcaccgttgctaaaaaagccgattcgctatactgtgtagtcagcgttgcaagtatcgttgctaaagtgacgagagatattttacttgaacaatgggcccagcaggtatcaccacctgaggcaggccctcttggttcaggatacccagcagatgcaaaaactacagcatggctaaggaatacaatgaaaccattgatggggtgggatccccatctagttagattttcttggcagacaagtgaaactcttttggacaacaaaggtattcaaatagaatgggaagaaaagagtaaatcgaaacccgtctgggccggcaagagtatgttacaggctgaaagaaaaccgctcaccctcgacagttggtacggttaagatgttaagttcgttacacattatataatattttatcctattaatctatcttgtatctcattttatcgcatcacgccgtagtccgatttaacggttttgtttgttacccttcggagtttgagaaggttcatcgtgaatgatctctataatgtcaattattgcttccatcatatacccatagtactgtttgggccgctaaaaactccggtggggcttgcttggttgagtgctgagttttccggcatcctacccgctttttaaacgaacatttcccaattgtgaaggcgaaaacaaaagaaagagagagaaagttgagtcatcacgtcaccacgtcgccactaaacgacaagaaggtaaagaatcctgctgtgtcaaaaacacaatcaaaacaaaaatacagacacacggatataaggtgtaattctataatactattcgtggtcaattacctgatagtctagtcctgcaggtacatgagtaagtgaatggatagagggatgctttgagaggaattcaccccaccacatggtgcaaaaataatcggagctgcacttttcgggaaatcggcacctgcggaacgtacaaaggagttttcgtatgtataggtatctttctagaatgatatgatctggtgaataattaccagtagattcgtcaccatgagggtgagcggggatgagagcttgttgtcttgtataaatgagaggtgtagatcaagcaacaaaactattctacagagcctgtcgtggtaacaatacgcacttaaaagtatgtgcaggcataaagtgttacttgtcttaaatgcagctggaggaaagtccgaagggcatcagaaactgttgaaatgtgttgaagagaagctaggattgaaaagctttgtggaatcacgcggatctgaattggtaccggtggttgatgagacgaaaagtagtaataaaaacagtgctactggagagattattgtattacctcatggttccatgcccactgtcgatgcacctcggataaaactctccgttaccgctgacgatgcggttcaggtagaggtttgcgataacggaaaacttacggttaatgacaatgttaatgataataatgcttttgacgatgatgatactaatgatggtggattcagaagtcccaaaagaagaaaaatttcagtctccgatctaacgaactctaatcacgtatctgccgctgaacatgtaatcacaacaatcttggtcttggtgagaagttataacgaaaacttgcagcgacagatgcatgatgtcgaattggatgttcacggttccataagggataattttgatatagagaacaaagtaattggtattattggtgcaggaaaagttgggtatagaataatggaaagattggtagcctttaatccgaggaaaattctatactatgatcccaaggaattaccagtcaaaaatgtcaagaaactaaacgttgttgggcttttgatcaatcaaaggggtgacatagtacagcgggttgacaaattggaagaaatgctatcacattcagatgtagtcacaattaattgcccgctaaataaggattccaaagggctcttcaataaggaattgatatcacatatgaaagatggttcatttttaatcaatgcttcaaagggaggcatatgtattgcaagagatattaaagaggcaactaaatcgggtaaattggcaggttatagcggtgatgtgcagcattcggaatacgaagcacacgacttgaaggatattttggaaggtttattacaaaggagacatggtcaaaagacaaattagggatatactgttctcttctttatatatatatatgtatatatggaggtatagatgattaatgatatacggttgacgtgtcggagattccgtggcaagggaaaggggaacaatatctgcgttagaaagttcttcggcggctaatctgaaatactgatcatgtcacacgactctacttccctaatttgtccacttgacgcggataacacgatcgttcattaatatacgcccttgttcgtattcagtgaccctttacgtccatcgacacactcgaatcgtgaggagagggaaactcgttgagctgatggccgcgatcgttccaactacaaaaggatgacatctaattgcttattcttgtgataaacctttgagtttacgatcattaatccttcttcttctcctttttccttcaaaagagaagagcagataagcttgcgtaatcatattcttgtaaatcttttcaattcccttactccaaatcaatgtcagccctcattagagcagcagtccccagagttgcaagaatctcattggcatcgagattagcattgagatgttacgcttcctatccagctcataccgttatcggtatgccagctctatcaccaactatggctcaaggtaacttggcccaatggtcaaagaaagaaggtgagcaaattggtgcaggtgatgttcttgcagaaattgaaactgataaggcaaccatggattttgaatttcaagacgaagcttatttagcaaaaattttagttcctgaaggtaccaaggatattcctatcggtaaaccaattgcagtcactgtggaagacggtggtgatgttgacgcattcaaggacttcaaagtggaagaatcagctccaaaggaggaaccaaagaaggaagaaccaaagaaggaggaatcttcagctgatgctaaaccaacaccagcaccttctcaaagcgcttcaaaggtcgctgccccaccaactgacagaattgttgcatccccattggccaagactatcgctttggacaagggtatctctttgaagagcgtgaatggtaccggtcctaatggtagaatcacagccagcgatgtggaagcattcttgtccaaggctcctgctgctggtgcaggtggtgctgccggtgcttcctctgcatccggtgctgctactgagacttacgaggatgagccaatttctaacatgagatctatcatcggtagacgtctattggaatccactcaatcaattccttcatacattgtttcctctgatatttctgtatccaaattgttgaaattgagaaaatccctaaatgcttccgctaaagatcaatacaaactatctattaatgacattttgatcaaggctattaccgttgccgcaagacgtgttcctgatgctaatgcctactggttgcaagatcaaggtatcattagatcttttaagaatgtcgatgtttccgttgcagttgccactccaaccggtctattgactccaattatcaagaacgccgaatctaagggtttggtttccatctctggtgaagttaaagaaaaggttgctcgtgcaaagattaacaaattgaaaccagaagaattccaaggtggtaccatctgtatctctaacatgggtatgaacaacgctgtttctttgtttacttccattattaacccaccacaatctactatcttggctgtttctaccgttaaaagagttgctgtggaagatgctggcgctgaaaatggtatctctttcgatgaccaaatgactatcactggtacttttgatcacagaaccatcgatggtgctaaaggtggtgaattcatgagacaattgaagaatgtcgttgagaacccattggaactgctattgtaaatttttccctgacgatagttcctgatttaacctgaattgaattaatcaactgctgctatttaacctaaaaaaaaaattccaattaatcggaaaagaaaaaaaaaattctaataattttaacgatgtcctggaataaatacatacacatacatatatttacacatatatatatcctcacattcattattcaaatataaacttcaagtgtacctgattgattcttgtattttgtctcattgtacgaacatatccttggatggcttgaattaatttttcacttcaagctcgagcaactctaaagaacttttagtggcttcttacaggtgaaatcatcaaccaatttcacagcgcacaggaaaccaatgtcattcctaccatctttcattctaagtgacgaatccaaggagagaatctcaaagattctaagtatgagccataccgttgttcattacggatggatgcctttcatcttgtacttaggttgggctcataccgcaaacaggccaaatattttgaacctgctctccccattgcctagcatttgaataacaaaatccatcatgtacataaatatctgaatttcatttcacatttttttgcaatttaaacctctttttctttgactacgcatatgtatatatatctatgtatgtatgtatgtggtagatgcgcatcttgtagtcattattaaactcctccaccaccaggagtagacgtatgggagaactcacgcctttacaaaaggaggtagttgcaggattaacagctggtactttaaccactataactgttcatccattagatttagttaaaattcgattacaactactggcaacaagtgctcatcggtatggttaccgcgaagtagcgcagtcaatagtatcaagttcacaaagatctcatattctaaaggaagcctataggggtttaggaatcaatcttgttggtaatgcacttgcatggggagtttattttggtctttacagagaggcaaaggacctgatctacggatgggcaatacaggattgtgatcaagtggttaaatttactgatagagatggtaaaatgtcatcattgatgtatttaggtgcaggtgcttctagtggtctcttaactgcaattttgacaaaccccatctgggttctgaagacaagaattatgtctacaagtagttatgcttccggttcatatcgttcaacatgggatggcgttaaaagattattacaggatgaaggcgctagggcaatgtggcatggattactgccgtcaatgtttggagtttctcaaggtgcaatatattttatgatttatgatactttaaaaaataggttcagttccgtaagatatagagaaggtagaaccaatgacagtaataataatccgagattaaaaaatacagagacaatcgcgatgaccactttgagtaaaatgatttctgtaagtacagtctatccatttcaactgctaaaatcaaatttacaaagtttccaatcggcaacagaaaaatataccctataccgactggccaatcggatctacaagctagagggtattgggggtttttacagaggtctttcggcaaatttaatcagatctataccttccgcatgcattacattttgcgtctacgagaattgtaaacgttacttgtgagatgattcatatagacattcatatttataaactcaatactattgttaagccaaatcttaaacgctggaaaatggatcgctattcgtaggtgtatattagtttaaggtacaaatgtgtaaataaaaacaatacctataccgaaatcgatttctatcctttaagaggaataggaaatcgaatcaaattccaagacgaaataaaaaacgacgtattcggtaccaagttgttatcattatttaatttagtaaccgagagcagccaacttcttggcggcttcagtttcagaagtagcagccttagcggtagcgaccttcttggtaaaagccttcttcttggcgtagtattcagcagatctaacctttctcttttcttccaacttggaaacgatgttttcgtatttccagccgacagaggtagccaattgacccaagttagtgtactttctacctggcttcaatctcaaaactctcaaagcgtgaggaaccacaactctcttcttcttgtcatatggaggtgggataccttcgaaaaccttgagacgttccatagcggccttaccacgagcggtcttgtgagcaaccataccacgaacggccttgtagaagattcttgatggagccttgaagtggaatggaccacggttcttgttgaaagcagtagcctttctcaagtagtcgtggtatttcaacatgtttctgaagaattcaccagagatgttcaaagcttcagctctcacaaccacgatcttttgaccttccaatagttgcttggcaacaatggaagccaaacgacccaccaagtggcccttaccgtcaataacaacaactggctcaaaggtagacatctctcttgggttgttaaaaactgatcctaatctatcaatgaagaggaagtctcacttaatcaccaatatttccaagatcttttggaaggcttcacgttgactgattagttttttttcactttactcactctgcaaactgtgagtccgcgtccgcccagcgtcactacctgctccccgtccgttgggattagcctctgtccctgtccgtgcgtgcgtgggtaggatgttggggggataccgggcccgtgtgagcgcgtgctaggcagagttcctggcgtgggaagctaggcttgctaggcagaagcgtgggtctgctaggccgagttaggccgattcccccaatgtgaattccgaggtgagcggaggtgaccgagcgactcaatacaactcgcgttgtggataatttccaaaaaaaataaagtgacgcatgaaaacttctataggatgcacggatttatagacattgtagatgcacggatggttaggagcagtcaaacactttccctgaatgtgagttaatgcgggggaggggcaggaaaaaaagaaatgagggagaacaaaggaaatggaatattcaactgattagcgtatctgcatagaatttaacaatgtaatcacctacagaatttccaacattcattggagtcatcctttgacgtttattgttcggcattctggttcctggagaaatttgacacctttgacattcttgtaatggtactattagaaaagttttcaacgttagaccgaattgatcgtttgagtgattagcttctacccttaaccttaggaacaaatctcttaaaatcatatgatgcggttcttgtggcgaggacatccttgaatttttaaacataatttcgattcctgatagtattagcaatacttttaatccattctgctcagtatccttatttaaacttctcgccactttttccctcgaaacgaattgtaatatttttctcactattaaatttaattcgcttaaatttagtgcaatttgaattcttatactttcataaattttggcccccctctcatcttttggtactaatttttcaaattggtacaaggggaaagtatttgatgcatcgatatagaatacaattacatcggaattagatttatctattgtattagctacatattgtgccagtgagttaggatttggtgcagcccatgcggtaactaaatctaactcgtctagggatacatttaaatccaggctactatcattgccgatagtattattactattgtcctcactacccattttccttgacttatgctttttttttcgctaagtcgcgttaagaacggaaaaacattatcagccctttccttatatatatacacatatatgcatcgcgttaacagttcaataaaactgataatagaaatgaaaataataataatgataacaatattatgacaaaaacaataataatgataataataataataataacagtaataatagtagtagtaatcgggaataaatgaaataagaataccaactgattaatcgttgaccagacttatttttgtcccctcagtatcgagcattaagtccttgccattactctgcgtagtttgactttttaaaggtgaggatacaacgtcttttgtttccccaccatttgtagttggattggaatttgccgtattgttcctttctctttgaggtactgctggtgtattattaacagaactaaattgtaataaattccaaacaccaggacttgatctacctttatcgactttaccagtggcattttgatctttacttagataattttcaggatcgttttgttgttggtttgcagatggtgatctattttgattcgcagatcctctctcgggtgtatatgcttccattgcggtaatgtggaaggcctttgtaggtgatcttaataagtttggtccttgtgttggtgaaatctgtgtaggtccagtccctgttgccgtcgttattaatggtgtaatacttgatctagctgctgcagaagctgctgtagaagaaggaagtggattttgagaatatactgcctggtgtggtggtggcattaccgtaggtggctgtaaggaggggtgcggcagcggtaaagatggtcctgattgttgctgtagctgtcgttgtgcctgaggttgttgttgttgctgctgctgctgttggttgtggttgttgtggtgttgtggttgtggttgtggttgtggcagttgttgtagatgtggttgtggttgctgttggtgttgcaacaattgagggggttgctgtgatggatttatcgattgtgcctgctgtggttgatgttgtgaactctgatgtggctgttgcagctgctgttgttgcagtggtggttgcggtaggggcggttgcacctgtgcttgtgcttgtggtagagatggtacatgttgcggttgagatgcattatcagatgatgcagatagaggagtatctaattgcattctatcgacactacctgctgtattaacccttcgatgagccatgctctgttgctttataattgttggctccggtgtataatcgttttgagctggcaaggaattgaatttagagagatgtagttgtaattgtcttgccacagatgagcctcgcctcactttaccaatcttccctgagttccatttattgagaaaatctctctgataatcttcactaattctccatttcatacctttaccgggctcatttggtcttcttggaactttttcaaatgctttgtttaacgataaattatgccttatcgaattttgccaacccgtcttggcaaatctataataggcataattcgaagaaatgtatttgtaaatatctgccaatgatataacaccttcgcctgtggataaaattgcctgggtaatcattgtagcataggaatggggtggtttaacatttctattttcatctctggacagatcagaggcaaagtctaatgaattggggaacccaatttgtgtaattgacaattgagggttatgataattgggagtattaccactaccattactattggataaatctggtgacatcaatactcctggttgccctgcaccatattgcatgttattacttgatggattaccatacattttaaaagtacgaacttgttgaagttgaggtggttgtgattgtaatggaccatttcctgttacactgtttcctggttcatcactattgctaatgttgccactgttatgaggtggattcccattttgataaccaccattttgtaaaatatcataaagtaacgcattttgatctaatggtgaataagcaccagcattgggggaaccgtaagtggatgccaactttggcagtaaatgatcgatgcttgattgagatacaacaggttcttgatccggtaaaataaacatcatttgagtgccgccgacatcaaggattgtacctgacgatagtattacggcagtagattgtgcacctgtctgtacgcgtttaaaattaaccttcgcaccattccgtcctaatacatgaaactcccaaccgccatgttgcatattaaatttaatcactgcatgtcttctggaaacaacctttgccggtcccagatcaatactaacacgaccttccttctgttgaggtgtaccaggcggcagatttaaactatccgtattacgtccaatggaaacttctaattctttaacgtaataagtccagtctctacctgagattttagcataagcttgtacttccgttgccacatttcgttggttactaaactgtttggaaaccatcgttggttgctcaggacattgtaatatgcctataacagaattaaccagcccttgatgttgttgcgggctataccgtctatcagtcatatcgcgaatagctaattttgtcctttagtgttaatttctcctagttttcttttgattttagttcctactcgctttcagttgtctggctctctttttttttgtgtgtgtattctctcttaacttgtaagtactgatcctacaactattaatgctactactgctactactactgctattattgtttataggtaaaatattcctttgtgtagtttatcttgttgatgttgatgatgttgttgttgtgtgatgctgtattcttccttctgcaaacttgtttatgtttacagttgaagggatttaccgtcgtaaatgatgtgcgtatattttttgacctttttttcttgtcctcatctgttaacgtaactcgcacaatgaaccggggaaaaaggattatacggcttttcctctttcattccttttcatccctttgttacgtgtaggcctcctagacatctgtacaccatcatcacacttacgtggactgtgtcacttatcacgtgatatgatcactgactaattttgtattgtttttgttgttgtttttttgctttgattaaacgatattcatatattatctaattattaattggtcggatcctaatcttgtaattacgacaaatgatgtcttgaattgcttgtatgctatgatatgcctatgtctgtctatcttcacgccaaagagatctatggcccggtcggcgctcttttctctctatctcgatcgtagtccgcgaccgtaaatccaagataaaccaataaacggctaatctcggtatcgggggggaagcgcaatttgtcgtctctgcggctactgacggagttttttctcttgtcgctatcgccaggatagacatgcattgagttacaatgagcaacaggggaaaaagggcacataccccctccgctttcgtcaatgtacaaattgctagtgccttttctcattgttatcaaagggattcgaccactcactataatgaagatacaatagcgctgtaaagcaaactttcctcctcattatcgtgctcacaatctaatgtaccacgttcttattttcaatttataaaataaatgcgaaatttatcttgcttcattcagtttcactaggatgatttgcccaagattgtgccttattcgaagaaaaatgaggtaaatggtaatgtttctgggacttctgtgatttgcctctatttccggcattaggtgatacggatgatgcccttaagggtggtttaggagacgttgattcggcatcgtagtaggatgaagatgatggaatcacttgctcgtgaattgtctgtgagagtagttgctggtgttgttggtgttgttgccatttacgacggcttcccctctgtgaacttcttaggaatccttcaaatcggaataaactgtcctgcggggattctgtactacgggctttacccgaaagggaaagcgaattggttggagatttgaagttaccagagtttctagaacgtgttagtccgctaccattgccgcctacattaccattagcgctacagactgcactaacgttaccacttgcagtaccgcttccgtcttcactgtaaatcggttgattcccgcgatgtcctaattcgttaatcaaaccttgactaccagtgttggctgcaaaggaatcagctaaagaggtcttgaaggatatgttagagggaacttttgtcaagctatggtttaaaatggcagaaactttcttgtcatacagttgaggcgcggattctaattggagagtctgttctgtctgtgcagtttctacagagttggaacgatcatgcagagatccgatgtcatttggcggtgcggactttgattttcctcctgcagctgccgcagccgcagctgctgcggcagcagctgctgaagcagtattgtttctggtaaagaaactgtccaagttgtccagctcggcccacatgtgactcaaggaagcctccttttcttcaatcatcgacaatgaatcattggtctctgaacgacctaaagcgtagtcagcgtctgcatggaagtctacgatatcctccatgtatggcatttcttgtgcaggatcttcaccggtagtgttggcagtacaggtcatgaatacagcgtgaacattgtgtcttgttgtggcagctgtcatagtgggcatgggcactgaccatccactttcatccggaatcccgaacaaggtagcagtaacacggttactgcttttcacatcgttgtttcccatactaactcttaaaacgtctttgtccattttgcttcctgagacttgtggcacacaatcgagaacctctagagcacgagcttcgtagtctgtcaaaagaagtctcagaagcggtgatatcaaatcagcaccaacgccggcaaattccggtttcctcaggtcgactagtgggaaaatgtatttgagaatttccattgactgtaacttaacccagtcggttttgtttagcagaagacctgataaaaacacaatagtctgtgcggagtacttggggaaatagtttctggaaataaaactgatcacttggctgagaaagtcctttttggaacggaacttatttttggctaaggagtctaacaatctagaaattgagggttggttgttggcgtttgatagactaaccatggcatccacagcagtctggatattgctatagtcctttcgatccatggcttgtaaaaagcgaggcaaatttgaaattaaagcaaataaaagacgagattctgagtttgcaataatacgactgtcttcgagcaagttcaatttgtccaaaaccttccatgttatatcagaagaatttgctgatctcaggcctgtcatgacaatttgttgtaatccgtcaaaacgaccttcccaattggaggggaaagttgcgattagacatctaacggtgtctggcgaattcaaatcgatctttgagatgaatttcataaaacaggataaaacttcgatgaactcttgctcgtgaatactattcagacatgcagtaatagaccaaaacagctgtgggaagttaatcaggtcggcagggtccaactctgcggtaatcgcattcaatgtcatcaatatttgcatcgcaaatccttgaatatctggatttacatcggctacagtattggataaacgatggagcatatctcttaacatgccttggtctaggaaaattagcaatgaacggaacacctggaaggaacgacatgtaatgtgtctgacggagcatgtagtggcccatttaagagcaatcttttgccaatcgacctggagggttcctatatcaggaaatattgatagcaggtttcttattaaaagatccatcgcctttggtgaccttgccgaatttttatccttcatgaaattgtcataagaccaaattttttgtttgcttctgagaagttccaccgtatcttccgatttctcgtgggtaggcgccaatccaaaaatgaggtcgcagacgattttggatgcactttcttgaataagtgggacatagtggtcaagtagacagactgatacatgtaaaaggttggcaatattaccctttaaggcctcactggggtcagtcaataggttcaccagaaagatgatagacaggtgggctttggagaaggtgatgctcttaccatgataatttagacgatcccaaacgttcgcaataaaataacccttgtcgttttctgtaggccccttcacttcacttttggtcaaaggaatcatagatttgggctccaggttgctggttaaattatccacaagcccaataccacccggaacgttccccaaatatagcacaacatccctggcatgctgcacaaaatttggattacggtggtttatcgagacggtcatgataaattccaacgaaacatggatgttttgaaatccatttcccttacctagcgatatccagagttgctctacttcaattggtaatgtgttgttaaggtcaatagtgatgtaaaaaagattgttcaatatcataaaggtgtctagttcttcgatggattttagtgtaaatttattgacccatggtgttaaaagaatcaatatatccctcttggtttcaaaagaaaaagaatccatcgttcctactagagctgaaaatattttgagacaaagttcttgggacagaagctctgcaaatatacttgaaacttccttggcggtagacttgtatactgttttagatgaacttgccagacgctctttgaacactttggtatagaacgaattatggagtttcgcttccacagcagaaagcaagtcaactgcgtagctacgggcatcttctctgtctgagacaactccaaataagcccaaggatactagctcatcctcttctaaaaccaagttgtccatcttcagaacggtcttgcataacgtgatgtaatacaaaacagaaacatgggggctcttgtggtgggcagcacattgaaaggccacctccttgaataattgatgattactagtgttcatttccaaaaggttctctagagccgaaacacccatattcttgaaagactcatcttcggcgttaaaaagtgattcaatccaagaaagaagtccagcgatgtcaaacgaaatgacgattggcatttccggaacatcctgtatagtcttggtgatggtgtcagagcataacacaaccatcgtctcgagtgcaaccttttccagtctacttctttgaaattcaatacctgccgtaatcgctgtacgatctctgctattatcagtgttgcgaatcatcgtattgtacctttcctctgcaataaaagcaagttcaccatatccgcaccattcttttaggtacttaaaacaggaagcacgagcttgaaagggaaacaattggtcaaactgtggttctaaacgtaccaccgaatagtaattgcgaagaagttctgcgaaataactgcgtaatgtttggaattcgtacgaatattgcacagattcctcttccaaaaatttctttacatgtctgagtatttcagagatcttcttcaaaagtaccttgtcctctagaatcatggtttcattcaaaaatctagataatatggttaacacgtgaaacatttctactcttatcttgttattggaactttgcaacgaccatgtacacaaaaatccttcgatgctttcaatgtaggccttataaatgtttacattcatggagcttagacctgagataatggcatctctaatcattgtagaatcagcattcagcagtgggagcaccattttaaagacagatgtagctgacttaatcttttgatgttgcacagtaaagatttgttgacttttctttctaccgtggcgaaatcctgaagtgggaatatgcaatttctgatcattggtagaggtcaaagaagtacaagcgaccaccaagaataatttccactggttgataataacttccggtgaaatctccctgggtctatcttcgacgttattagcaatctgcaaaattattccatgaacttgcacaagcctaatgcaaacgattgatcggcaaagagccattgtaatgggacatgccacacaaactactgagaggagcttagggaaaattctttgccaaagagctgcatcgacaccgtattcagattctgcaatttttatgagaacaccttttttgaatttggcagtaagcttcgagatccttgatttctctaccatactaagtagagtcctcttactgtctaacaaagaatagaaatcagtatcgttgagaagatcgaccagtctcgtacctcgatgggccgcaaaatatgaagaagaccgggaatggcactttgagagtctgactgttttctctaccatagcttcatcaaacttcgatatgatcctcaatatctgaatacccaaatgacgtatacctgcatcctgtgagcagaggaagaataaaccgttaccttctacttcttcgatcactgtaactgtattcttccattctagagtttctacctcattaagttcttctaaattgttgtccactggcattaattcgataccatctaaccctgtctctcgctttttctcctcaagatttgaagaatggaattcttccaaccaacattccagtaatccgacgtaaagaattagaagtcttcgatattcggtggaggaaaggtacgacatgttatagctcgattgagtcttttcatcgaagtcaaatgaatacttggcaaaccaagtgattaatgtgtacggatttttctttgatgcaagagccttcagtgcattttgacagctgctagcaattaagagatcagcatgcactgcatttctagagatgatttcaatagtagatttaaatgggatttgtccagagatgtttaaacagctagggatagtttcgattaatgtagcaaacaatgcaatgttgagatttctattattgttattgttattgtcattagaaaaaagagaaaacttttcgaatggagtggtcggaggtctgttatgctgattctctggtgaccaaacttctgaaccgatattggaatctaacaataaaaacaacttgtaaaaatacgtgcaaacttcttcatgatttgacgtaagagcttcgttctgctttatcgagatgtcatttaagctcaattcgtaatacctactatcgttttcaggaaactcaggcttattgttcgtcattaatagtcctctatacgtgttaattaccaaaatcattctttcgtaattgataccatccagcgaaaatccattgaaagaagttctaaccaacggcagaatagcattttccatcaaaaagtttggatatgcgtacccaacggtaactaagacatccgatagaggatttattagttctaaatcagttgtgatccaattttctttcttcttcgtactcaggaaaagggcaaataatcgacttagggttctagtagtattgtttagggtttccgggcatctatacagatagacccaaactaatcttgatagtccaacaacaaataggactcttgcaggtaaacttttgttttttatctttctagcatttttctcaattaaagtaatccagtattctgagaaaagctctgccggcgccacacataatatagacacatttaaccgaaagatactagcccaatatttgctgctactactttccgtttgcaatttagctgttgtggataataatgctgtcattgcttcgacccatgttggatgattaacttccgctgtcattgaaccagccaatggcaagagtaattgactaattacttctgcgtaagctaagctgaccgataaattttccgcttgataaaagaattttgctatacttttcataaaatctgccgtctcttcaaatttttcaagtggatagttttttaacctcaaatatcgcatacctagaattaaaagatgaacgcctggctccaaatctctagtaacaaatgttggtattttctctaaatcagcaatgaatctatcactaaccgatataaattttctttctgacatccaacccaataattcagcaaaggaattccaatttgatgatttaattatgctcgatgaaattgacattggatccgtggtctttaattgtgtaaaaacaatttcttctagtttatcgctaaggtcttcatctgcaccttctggagcttgtttaacgatctcaattagtactcggcaaaggatataaatactaatcaaagattttctatctgcttgaaatgcagcatccctagcagtaatgatactcagttccagattacgcattttattatcttcaattgcacctttacttccggtcgaagattttgaagaactgtttcgtttatgtgaaaacctactaccattactcatggatttagaatgtgtctttggttgcgaaattgatgatgaaggctgatgtttgataggatattgtttaacttgatcattttcatactcttttaaaagattttccacttcttcagcggctacgcaagcaatttccgatttagtctttctccaaaacatcatagcatctattactggtttaggtttgttcttagcgatatgacctagggattcaactattttatcaaaattaggatcaacaccttcacctaagatatctacaatcggcggttctgaagttaacggatgatgtaaacattgatttaatttattttcagcatgtctgacgaatttcgtgaaaagaatgtgtagtgcatattccgaaggacttttccagtccgttgccatctgctgtctcagattggaaacgtagtcttcaacctgtgatttcctctgtgtttccgttggaatctgctgttgtagttgttgtggttgctgcggttgttgtggttgctgcggctgttgtggttgctgcggttgttgtaactcctgtggtttctgtgataactgtgatcctaatccatcgggaggcgttacagaattaataagaaagtttccagtttcatcaacattagtttcattattagcatataaatcttcccctgatttctctgctaactccggtacaggtgtaaaagatcgtatttctttcccgctaatctctagcggtggcggtatatcgatcactggcgctaattcatctgtttccgctataggagctacaaccgcattgtgaccaccaccgttgttggagttataagcactatcctcaaaaccattcgttaaattcgtctcagaatttgctgtcgaagagtttacttgagtgatatcatttggagcagttgttgttgcaggaatggaagtacttggctttggaaatctgaaactttcttgtgcacctgtatctttgttgacttgttgaggggggaaagtaaatcctgtattcatattttcagtccttgtgatgctctagcgatttgattgattgacactatagtaataagaactagatgtcaacgttgatgaagcgaggattgagaaacaatagaaaaatcgacttttgtcgcagtaatctccaagataggctcttattaaacgattctaaacctgtctatccttctatatttttccaggccctaaaaaataacaaactccccctttctttgataaatttaaaactgaaacttttgtcctagtatgtgagtgtatatgtattcgtattgttatgtatcttatgttaggctctcacaatagaacgtcaatgatataggctctcatagtagttccttttttatttgaatcaggaaaaataaaattacaccaaatcatgaaagcgttacccgtctttataatggtagagagatcgaatagatcaagtagtgatctcaacccaatgcacatagtaaattttcaaaaagatagcaaggaaaagattgatgacagtagtgtagttatttacattgtaactctaagatcagaatggggctttactcttggtttaatggcttattttttaaataatgaggttcttattacatcttcccggatgttcttgcaaagtactagtagccacaattgaaaatgtgaagggtatataccgataactaagtaagcaatacaaaacataagaggaaactcgagtgctttagtgacttcactgttatgagtgaacacaatagtcagggaagtatcttgtatttagattttgtttaaagttcgtatcctctggaaagcgtgaactcgcctacaaaacgtaaaaagtcgttttgagggaaaacatgggggagttgtaagatattaagaagatgattgaggaagagactacttttctactccagtgaggctccaaatttacttattatgcagtcaaatgtctttctgtagagaatattgagcttgataaacgatagaaatttagagtgtaaatggacatatgagaattgcctctaacggcttggataaatcagtattcgaaactcaagctgaagaagtcccatcgacaccctttcttatcttacctgcatcaatgctttgttctcttaataatacccatttaaatgcttactattatcgaatcatcgcgggtctgaaaaaatggatttgacaaaaacaatcattaacttgtcatgtaaaaaaaagtatatagaaagaaccaaaagtgaaggtaataatagtagggtagattcttagaaaatggccagcgaagaagcttccatctttctagaaactagtatcgtttcctttgtcagtaatgtcgatattgatgaaagtagttcggataagacagctacccaaatagctgaaagaatatctgataaaaaattcaagttactggatttaattgtgtcattaagagattatttaacatcacaagatttaaacagacgaaaaaaagctctatgttgtctttctacagttctttcaaagctcccagatgacaaattacttaaaaatgagatatcagtggtcctttcattttatgcatcgaaattcgatgatactctaatgatgcaagaaactttaagtgggatttattctttaagcggaatgaaatttttatcaatgacggaagtgggtcccatcttagaccttttgagcaataaatacaatccaagctctcatctagcagctactagatatttcgctttcaaaattttagagaaaatttaccagaggtttagtcctaaattgattgaagatggtgaattggcagatttattcgtaaaaactttcttacatgtgggtaatggtgaaaaggatcctagaaatcttttactctcgttccatttaaatgaattggtttcatcaaattggaacaacgtggaaaaatttaaagaagatttgtttgacattttattctgttacttccccattacttttagaccaccaaaggatgatccatacaaaatttccaatgctgatttgaaaatttccctaagaagtgccatttccgcctcacctgcctttgccgaagatgcatttggtaatttaattgataaactggcagcatcttcccccagtgttaaaaatgatactttgctgactgtaaaggcctgtatcgataaatttggcggtgaagcatgtctaaaacattggttacccctgtggagttctctaaaatttgaaattatgcatggtaacgatgctggatatcctgactcgcctgtatcatcaccaactcaaatatcagaggctgataattatcagttatctgtgaatgtaatgagatctatcgcaagtgcccttttgcaatttgatgaaaaggcatttgacaaatttctttcgcacattgtggaagaagttagacctaatttcacatatgaaaaggatttgaagcaaacttgctgtttgcttggatccatcgctagtgctaatcaacagatttttaacaaagtagttgcattagtgcttcctttattctttaaaaattctccagaactctcgaaattgaaattagaaataatgaacctttcctttttctttgatgcatacataagggtatttggtgaagctaatagtgaacaaaacgaagtaccacctaattctctatcagagcagaaggatgaaattttaatggtattgagcaaagcattaactgcaagtccaaaggtggaagtcaccataagaacactctcgattatacaatttaccaaattaataaagatgaaggggtttttaatgagggaggaagtcgcactcatcgtacaatacatttatgaagctattctaacagacaacaataaaaacatttattatgctggtttggaatccttaaaggctattggagaaatacacgaagacattgtttttgaaatatctttgaaaagaatgcttgagctactacccattgaccccaatgagggggctcagttaaatgagaacgagccagttgataaggaaacaattttgaaagccatattggatttcaccaattccagacataagctagtcaaagagagtgttctcggactatcaaaaaaattatgtcaagtagcaccatatgcggattctagtgaatattgtttcctaattatctcctctattcacacactcttatcgaacaatattgaaatgattagggaaaatgacgctggattcatcaaagaaaatatcgaaatgccgctattcgctgcaatgactaattatccatctcttcaaaaggatgatcataatttgacattgttatccaatataatcttctttctcaatttaaagagccccagaaatactcatcaagatgaattaaccagatacaagaaatattttgtcgacagtctgcagctttttgtcaaaccttcacgtcttgtagtgccatttgaaaaactcctatgtggaattgataagaactgtgaattcaatgaagtagagcactactttgcacaaactatggatcttttaagaagtgaagaaatcaccgaagctcagtttgagagattagggtacttggaattattaactatcttcacgaacaaatggatggatgagcagtcattgtcgaaatttattaatttggatgatctatcacccgtcaatttagagatgcttgtatggatagtcaaaggtttagtcatgaagaattctcatcatgcggtattattccaagaaaagtttgtgaacttactatcgagctcagaaattggtaactatatggccaagttatttgaagttttcgttgtagacgtcatcacatttcaaaaatacaagggcatcagttggaacaacaacgtcaaattgacttacaagcaaaaattcttcaatgatgtgtttagcagactggtggatgccttcaagaatacgtcagagatggacgttaaatccaactatttaacagcactctctcttgtttccaaacacatctcaagcaatttgatcgaaccctatatgaatgaaatgttaccgctacttttacaatccttagatatgcccaattctgaagttaaggtatctgctctgaacactctactagatacttgtgaaaaattccatcagttaattactgaacatgttcagactctatcgcgctcgctgttgaaattagtatcaccagtttcctacaatagtgtcagcgtaagggttcttgccctaagaatgctggagactttaacccatgtagtaccattaaatcacctccttcctttcaaagaggacattattgatggattactaccagtattggatgataaaaagagaattgtgagaaaacagtgtgtgggcacaagacaagcctattttgaactaggccaagtcccatttgaatgaacgattttttatattattatgtatatgtacacatatgaactattctttcatttccacctcttcctcctcttcactggattcctcttcatcactcatatccactggtgctaaaccaggtgtcaaaccagggtacctacgagccatagatgcggacacacccttcttattatcattgaatgtcttcttcttttgtctcctcttttgactttttgcaactctattagcactagtcgttttctccaagatatatttctgtaattctaaaagatcctccttttcatcttcgtccaattcccaagatttagctctttcagcatttacattgacaagtcgattcaaatgcttagtttctttcttcgtcaatttgccttcttttctatgcctttccaagacctccaattccgctaattgctttatctcctcctgacctcttctctgtttctgcaaatctcgccttcttatcctactctgctttttcttcaatttttctacatccagctcttgtaactgaacccttctcttcaaattacgatctattaactgtgccttagatcctttctgcttctgttttgtcttttgtgcactgttttcagcactttgaacagcacctggtagcatcttggctagcagtcctttgacagcatcattcgcatgcaactgagaaacattagaagacatactgaggttcctaaacgtcctgcctgcttacttctctacacttctatctctatcgcatctcattatctcatctcatctcatctcattgctgatatttttttcaccatctcctgttacccgcagttttgaaatttttcacggatttggaacaaatgaattctcaaaaacatgccagggacaatttggaggtaaaagatgataatacagcagaaagacataatcaaatataaagaaatacgaatagttaaaaggaaaaataaaaaattaaaaggtaaaagagaaaaacagagacttcggcggctatttgtttttcatatcgtttcgtgttaactattatttttcaatttcccacaaacttcgtcttacgaaccatatgagtgccaccacgaaggatccagtggtgaataacaaagttctgccggtggatgaaccggtaaagaaggaagaggattcacattcacagacacaacaacagcaacaagaagaggaagttatcattatccctaaacctgtttctgcagagcagttagaacagctgatatatcgttatagggcaatccaaaaccgccccaaagaaaataaagttgagatacaagctattgaaaggactttaggtgaaatatccaaggatcaagacttgtatttgtatcaactagagagactcagaaatgaaaagaaacaagatgtggaatatgaccaaaatctcttgagtagacaactactggccttacagtttttggataaagacatggatattccagacgatttgcttttagatgagagacaattggatgtgaatggtttagaagattcgtccgtacaatctctggatccagttaaggtttcattagattttgatgaaaatgctaaaagattaggtttgcaagataagtttactcacgttttccccactaaattaggtgtccaatctaccgaaggtatgatttcatcaagaattgctaaaagaattagtgaactagaaagattacctgccaatctaggtgcttattcattggaagatgcccttgaatttgttacaaaagatgatataccttctaacattgattccttaaagatcaaagctttagttgagctgaaaggtttaaaacttttaaccaagcaaaaatcattgagacaaaaattaataagtaatgtagccagtcaggcacatcacaatataccttacttgcgtgattcccctgttacaatggcagctcaaagatcggtgcaagtgagaaataaagttatagtacctcaaactgtaagattggcagaagaattggaaagacaacaactgttagagaaacgtaagaaggaacgtaatatgcatttgagaaaagttcatcgaatagtggaatacgtcaatagtaaacagttgaacacttggaactatcgcgatcgctgtatgcaatttggtaagcatgcacaggtgatgcataaccaaattgaaaaagaggagcagaagaaggtagagagaaatgctaagcaacgtttggcggcattaaaatctaacgatgaagaagcttatttgaaacttttggatcagacaaaggatactagaattacccagttgttgaggcaaactaactctttcttagactcattagctcaagcagttagagtacaacaaaatgaggtaaagataatgaggggtgaagaagtaccaccaatcacagatgaagaaagagaaaaggttgattattatgaagtagcccatagagttaaggaaaaggtggacaagcagccgtcaattcttgtcggtggtgcactaaaagaatatcaaatccgagggttagaatggatggtctcgctgtacaataatcatttaaatggtattttagcggatgaaatggggttaggtaaaaccatccaatcgatttccttaatcacttatttattcgaaatgaaaaaggaaccaggcccattcttagtgattgtaccactttctaccattactaactggactttagaattcgaaaaatgggcaccaactttgagaactgtggtttacaaaggtactccaaaccaaagacgtagcttacagaatcaagtcagatcgggaaattttgacgttcttttaacgacttacgagtatattatcaaagatcgttcagtgttagcgaaaccagattggatccatatgattatcgatgaaggtcatagaatgaagaactcacaatccaaattgtcctatactattacgcactactaccacacaaagaacagattaattttaacaggtactcccctacagaacaacttacctgaattgtgggcattactaaatttcgttttacccaagattttcaactctgcgaagactttcgaagattggtttaacaccccatttgcgaatacaggtgcccaagaaaagctagaattaacggaagaagaaacgcttttgattattcgaagattacataaggtgttaagacctttcttgctacgtcgtttaaagaaagaagtggaaaaggacttacctgacaaagttgaaacagttattaaatgtggatcatcaggattacaacaacagctttatcaacagatgcttaagcacaacgcactttttgtgggtgccggtactgaaggtgccaccaaaggtggtattaagggtttgaacaataagattatgcaattgaggaaaatttgtaaccacccattcgtgttcgatgaagtagaatctgtgattaacccaagtagacaaaatactccgctactttatcgagttgctggtaaatttgaattgttggatcgtgtgttacccaaattcaaggccagtggccatagagtattgatgtttttccaaatgacgcaagttatggatatcatggaagattttctgagattaagggatcataaatacatgagattggatggtgctacgaaaacagaagatagacaggaaatgttacgagaatttaatgcagaaaattctgattatttctgttttctgttgtccactagagcaggtgggttgggtttgaacctacaaagtgctgatactgttatcatctttgatacagactggaaccctcatcaagatttgcaggcacaagatagagctcacagaattggacaaaagaatgaagttagaattttaagattgattacaactgattccgtggaagaagtcattttagaaagagccatgcagaagttggatattgatggtaaagttattcaagcaggtaaattcgataacaagtcaacagccgaagagcaagaagcgttcttgaggcggctcattgaaagcgaatccagtagagatcaagaggataaggctgaactagatgacgaggagttgaacgaaattttggctcgtggtgatcatgaaaaggtccttttcgataaattagatcaacaaagaattcaggaagaaattgaccaagcaaaagctcaaggattggaacatccacccccaaggttaattgaagttgacgaattacccgaaatattcacggaggacatcaccaaccatttggaaactgaacccgttactcttggtagagtaagagagagaaagcaagtgttttacgatgatggcttaacggaagaacagtttttacaggcagtggaagatgaaaacaataccctagaggaagcaattcagaaaaggcgtgaagctagatctaaacgtcaaaaacagggtaaacaacaggaaactgttcaagaagacgatgagggagaacctgaagaacagcaagaacaagaagaagaagccgaaattgatactttggggaacactccaactgaagctgtcgatgaaccatttcagcctgaagaagatgccggtgccaacgaaaagaaacctaacggtaagcgcccatctagatctagcagtagaaaaaagcgcacaagctctgctgttgctgctgctgacaccgtggctgaagatgatgaaatggtgaattctgtggaagaagatggtggagaacctcaagagccggagaagaagaaacctaaattgaaaatcaagctcaatttgaaaaagacaccttctaccccggaaagtattgagagtaatgaaaagaaacccgagcctaaaaccaataagaagacgaagaagcaagaaattaatgaatttgccagccaagtgcagaatttgttaaatagcatgcgtgaacaagttgaagaatctgatggacatgctttgaccagtatctttgaaaaattaccatccaagagggagtaccccgattattacgcagtaattgaaaagcctgttgcactggatacaatcatgagaaacgccaagaagggtacctataagagcatggaagatgtgagacgggagctacaacaaatgtacgataatgctcgtttttacaacgaagaaggatcatgggtatacaatgatgccgaagcattggaacaatttaccaacaagtggtttgagaccgcttaacattttaaccgcttataagaattaggtgtatgtaatatcatataacacgaacagcgtgatcgacgcattttttttcattgattttgaaaaaaaaaattttttcaacatataagaagggtcagttgaaaagtttttggtatattcttcttcgcaatttcatttcactcctcttccattatttaatctagcaaggaaatcatcgatatgaaattcattcaaactgaacaatttgtccaaataccagaaggtgtcagtgtctacatcaaggctagaagcattaaggttgtcggcccaagaggtactcttttcaaggatttgaaacatatcgatgtttccttctctagagtcagtgccaagttggttaagatcaccgtccacaacggtgacaggaagcacgtcgctgctttgagaactgtcaagtctttggtcgacaacttgatcactggtgttaccaagggttaccgttacaagatgagatatgtgtatgcgcattttcctatcaatgttaacgttgtcgagaaggacggtaagaaattggtcgaaattagaaactacttgggtgacaagcaagtcagacacgtcccagttagagaaggtgttaaaatcgaattttccaagaatcaaaaggatgaattgattttggaaggtaactccatcgaaaacgtctctcaaaacgctgctgacattcaacaaatctgtcgtgctagaaacaaggatatcagaaagttcttggatggtatctatgtctctgaaaagggtgtcattgaagactactaagcctgagaaggaaatctgtttgattttgtatatatgtattttgtatagacactgatgttttaggtcggttggccggtgctagtgtaccggtcaacgatcagaagcggtgtgcttttgcatatcgttcagtgggcgacgttactagtgctcgtggaatatagagccgctctacgtcgccgatgtcttctaataaacggggtatcttggattggtacctatagtttgggtgtatttttctttttcttatcgattcaatcttagtgactctttgagtacttgtcttgtatttctgtaatacttatcttgaaatctgtgtgcatgttcttcgctttttacgctgaaagtctattttaatggtgttagatacgtcatttgaaaagtcacgtgaaagtcacgctgctctctcgttttttatctgccaccgagctcgcttccgtatcttgtcagatagcgatgtcgggtccgaggatctgccccgcgtgtagattacgtattttcgagtccgccccgggtgaattcaaccgatgatgcccgcatggaattgcctctccggatttcggagatgttgttgggctaactagcgccaaatgaagtgaatttgaagaaggcatacatagcagaactgccgccaagtagtagaacaagacaccatatatatagaaagccagatttgaaaacatcttatcagcaggccaatctaaagaatagcacacacaatcccttcgccgtagagcttctgttcttgccaatactcctcccatctctttcacacctatgcatgtctgtgcattatgttaacttgtccgggttgcatgcatagagtgaccgggtaacaacatctccctttgtcgtttcttttcaccgtgattttattttcggatttgaagctcttttgtcgccgagtatctgattggctctccgggttcatggcgaatccagggaatcaaatattccaacacgaatacctaatcactaggacgagagggaaactttttataataaaccaacgatacatattttatttatacaaaaaaggtccgtctttcacgaactgatagactgatagggtgacggattggtaagaacaccatctttattcaccacgcttcacacctatttattggttgttcgaatttagatccctttactttgctgggtttttacttctattctactctacatcccaacatttaaagacatcaggtgtcaacagcaacaacaataataatattcgagtataatcaacgatgctgagagctatttcatccgcctccgcacgtcaaacagtgagcaggttggcccaaaggtcgaaagccgcctccgctgtcaacaagagtcttgtcggtttatcacaacacaacagattttatgctagtggtgctgatcaattcatggcaacctccaatgctaattatatcgaggagatgtatgaagcatggcaaaaagacccatcatctgttcatgtatcatggaatgcgtatttcaaaaacatgggtaacctaaatataccctcttctcaagcatttcaggcgccacctactttaacaggaggcgctcaaggggctgaaaacattccaattgatagtaattttgcctctgctgctaacatcgatcaaaacgttttactgcatttgaaagtacaactattgtgtagggcttaccaagtaagaggtcatttgaaagctcacatcgatccattacagatttcttacggtgatgataagtctaagggtgtcccaagagaattaactttggaattttacggcttctctgagcgtgacttggacagagaaattactttgggtccaggtatcttgccacgttttgcaagagatggtaaaacgaagatgactttaagagaaattattagcagtatggaaaaattgtactgtacttcttatggtgttgaatacactcacattccttcgaaaagtaagtgtgaatggttaagagagagaattgagattccatctccataccaatatagcattgatgaaaaaagacaaattctagataggttgacatggtctacttcctttgaaagctttttgtcaactaaattcccaaacgagaagagatttggtctagaaggtttagaagctgttgttcctggtattaagactttggttgaccgttgtgtggatatgggtgtggaagatgtcgttttgggtatggctcaccgtggtagattaaacgttttgtcaaacgttgttcgtaaaccaaatgaatccatcttctcagaattcaagggtactactacccaagatggcgtggatggcccaggtgacgttaagtaccatttgggtatgaactacaagagaccaacaacttctggtaaatatgttaacttgtctcttgtggctaatccatcccatttagaatctcaagacccagtcgtgcttggtagaactagatccttattggcgctaagaaacaatttagatgagcagaccaagtccattggtgttctattgcacggtgatgctgcatttgctggtcaaggtgttgtttacgaaactatgggtttccagaacttacctgaatattctaccggtggtactattcacgtcattaccaataaccaaatcggtttcactacagatcctagacatgctagatctactccttatccatctgatttggctaaggctttcgatgcccccatcttccatgtgaatgctaacgacgtggaggcagttactttcatctttaacttggccgcagaatggagacaaactttccacaccgatgctgttattgacattgttggttggagaaagcatggtcacaacgaaactgaccaaccatcctttacccaaccaatgatgtaccaaaagattgctaagcaaaaatctgtctttgacgtttacgctgaaaaattgatggtggaaggttctttcacaaaggccgacatcgagaagcacagacaatgggtctggagtctatttgaagaatctttcgagaaggctaagggatacgtaccaaacccaagagaatggttaaccgctccatgggaaaacttgaaatcaccaaaggaaatggctactgaaattttgccacatgaaccaacgaaggttgatttggataccttgaagaaagttggtttagctgtctcttcatggcccgaaggttttgaagttcacagaaacttgagaagaatcttgaccaacagagcgaaatccattgaatctggtgaaggtatcgattggtctaccgctgaagctatggcctttggtactttagctttggaaggctacaacgttagagtctctggtgaagatgtggaaagaggtactttctctcagcgtcattctgtcttgcacgaccaaaagagtgagagagtctttgtcccattgaagaacttgtctgagaagcaaggtgatttcaccatcagtaactcttcattatcagaatacggtgtcatgggtttcgaatacggttactccttgaccgatcctgacaacttggttatgtgggaagctcaattcggtgatttcgccaataccgcccaggtcatcatcgaccaattcatcgctggtggtgaacagaagtggaaacaacgttccggtatcgttctttctttgccacatggttatgatggtcaaggtccagagcactcttctggtagattggaaagatacctacagttggccaatgaagattcaagatttttcccatccgaagaaggtctacaaagacaacatcaggactgtaatttccaagttgtttacccaactactccagccaacttgttccacatcttaagaagacaacaacaccgtcaattcagaaaaccattagccctattcttctctaaacaattgttaagacacccattagcaagatctagaatggaagaattttccgatggtgaattccaatggatcatcgaagatgttgaattgggtaaatctattgctccaaaggaagaaattaagagaattgtcttattgactggtcaagtttataccgctctattcaagaaacgtgaatccctaggcgacaagaacactgcattcataaagatcgaacaaccacatccattcccatttgctcagttgcgtgatgccattgactcttatcctaacttagaggacattgtatggtgtcaagaagagccattgaacatgggttcttggtcctatgtatctcaaagattcccaaccgttctaaaggagacccaaaactacaagaactctcaagtgagatactgtggtagagacccaagtggtaccgttgctgcaggtaataagcccgctcatactgctgaagaagaagatttcctaaatgatgtatttggcctgaagaactgagatgcttttttactcttttaaatggctttttatatatatatatattatatctccaaatttttaacatgtgtatttattcaagttgatcccatttgatcatatagtgataaaagtaatatattataacatattgcatctaaagtgagttcgtcaattactctgtttttactgcgcgcttaatttgttgtggttaccctccctgttaattatcgccctgtttcaaataacttacccttagaaatacggggtaaaaatcttattatatataactgtcgtaagaaagtcaatttctttacccttttcaatcacggttacccatcacattaggacaggtacaataaaacatgagcagtagtgtaattaagacagcgctagttactggtgcatcctctggtattgggtatgcagtcgttaaagaattggccgaaaatggattcacggtttatgcatgtgcaagaagattagatctcttggaacaactatcaagaggatacgaagctaataaggttatcccctatgcactagatatttctaactttgaagaaattgttcaattgaaggagtatctttcaaaacatctaccacatcaaagattagatgttttgtacaacaacgcaggccagagttgtactatgccagctgttgatgtaacgaacgaaagacttaatcaattgtttcaagtcaatgttattggtcatatgaatattacatctcaactatgccaattcttaattaacgccaagggaacaatcgtctttaccggttcgttgagcggcgtcagcgtcttcccatttggagccgcctatgctgcaactaaggcagcaatccaccagtatgcgcgtgttctccatgcagagatgaaaatgtttgacgttcgtgtaatcaatgcaatcacaggtggtgtaagcacagatattgcagataaaagcccattacccaagagttctcccttttacttccccgaaggattaaaggcgttggaagagagaaaattaatgtcggctaaaaacttccccatgtctgcagaaacgtatgctcagaaactggttaaagatatactaagtccaagggaccccgttgatgtctacagaggaactcttgcaagcgtagtttcctggttgatgatgtttgctccctactggctcgtagagtgggttacattcaagaagttcaaactggactcggttgaaaaagcattagggcaaaagcgtgagactgagaagcaagaatgaaaggattgatggatcgcaggattgattgatatactttttagttggtccccccttccccccgacacattcacgctgtttcactgtgatacactcttgtttcactttgatacactcctgtttcatattcattctccctttgtttgattctctcttttctctttcctcttttctcatgttaccttttcttttttttctttctattttttcccactcccctgttgaaatccgacatacgtatttttccgattttctatttctttctgctgccccgattagggttgagaagaaactgttacggtagcgaagaggtatcccatttatggactacggttacttcttactgttacaggtcgcgagttactgcttacacgtgcgtcgtgtcagcagatttactgcgctgagttatgtgtgtttgagttcaccagtaaacaacgccagtcgatagaatcgttcaaggcacctccgaagtcattcattaatggtgtgctacccagattaggattctttttcgcgggcttcatataaaaggagagaccgattggcatcgttttcagacaagattcagagtagaaaggaagattttcttttccaatttctgtttttcttgttgttacttctattttcttgctggtttctttcctttctgttttacttttcattatcatctaaaatactaaagatcgaaaaaaaaccaggatcataacatagtttacagagaccttctactaggaaatatatcccttcccttcctttaattttaccattccaactatttacattcctttaagctattagcggcccaactactatcgttcctgtatgtatacaagtaaagacaattgctgcgctgtgtctttgtaaattttcacagtgtggtatattgtttgcttggatgaaagacgtggtgatgtgagagcaagcgtggtgttactgggttaattgaaacgatgacaatgtactgggttcttttggtgttttttgtttacatttttcattgtatgctggttttttcgctgatgatttgcgcaatgacgaataggaagaagtcttcctttgtgaatcgtgcgcaatcattccgtttcgtcacgacgacgcgacgacgcgacgacgcgacgtctcgacgtctcgaaatggtcgcgtatattatcagacaatcaatcagggactgcagcgaaaaatgtaaattaaaaaaagaaccagcaattaaagtatatgagagttggatcaattagaagaatggaatgagatcttcccttaagatctgcttccttcatcgaatcgatccaccctctaaatcttgctgatccagaacgcaagtcaaccgatagatcatcaattgttcaatcaattaatcaaccgtcgctggccgagggatactcgcatagacactctttcgttcatttttatcattgatttgcattcgcaaatttactaacactcgttgtattgcagttaatcgtattagtttttcactgttttttttttcaatcccgctaataatcaatcccaagctaaaatgaagttatccgctaacattttgaccgcggcattgcttggctcccaagtctttgtcaatgctatgcctcatatgccaatcaaaagagatgaagaggattgctctgaaacagtaccagcccatgctgattctcatcaacacaaaagagccgttgcagttaactatgtttaccaaactgttacagttgacggtaatggtaattcatacacaccaactgcatctgcttcaggttcagcagctagctcttcagctccatccagttcagatgcagtggctatggttactcaatacgtgactccaggtgtttctgcctcttctccatctggtggatatggaggtggcttgagtggatttgctacttcagtcatccacaatgcccagccaagtcaatcttcctctccaagttcttctggcagtggctcctcatcttcgtcatcttcatccccaagtggatctggtgacaactggactgaaaccaattctgaagcctcatcatctggtgatgctagttccaactccaacgcctctgcatctgctggtaatggtgattctactgcctcatcatctgctgatagtactgcagaatctggtaccaattcttctgctcaggcttcagctgaagctcaagctcattctaacaatggcaactcccactcagattctgattcatcatcctcatcatcttcatcatccaataacaatggtggttcctcttcttcttcctcttcctcctcttcctcctctggttcctcttcaagttcatcaggttcttctggttccggcggtagttctagttctagttcaagttccagttcatctggtggtatctttggtgacctttctgcctatgaaggtccaaatgaaaaattccaagatggaactatcccatgtagccaattcccatccggtcaaggtgttattcctattgattggattaatgagggcggctggtccggcgttgaaaactcagacacttctactggtggtagttgcaaagagggttcttactgttcctatgcttgtcaagctggtatgtcaaagactcaatggccttcaactcaaccaagtgatggtagatcaattggtggattgtactgtaagaacggttacttgcacagaactaacaccgatgctgattacttgtgtgaatggggtcaagatgtcgcaagcatcgtttctaagttggatcaagatgttgccatttgtagaaccgactacccaggtactgaaaacatggttattccaacttatgttaaatccggtaactcccaaccactaacagttgttaatcaagatacctattaccaatgggaaggtaagccaacttctggccaattctacgttaacaatgcaggtgtttctctagaagatggttgtgtttggtcaactcctggttccggtaaaggtaactgggcaccattgaactttggtgctggttatacaaatggtattacttacttatctttgattccaaatccaaacaacaacgttccattgaactacaacgtcaagattgtcgctgcagatgattcgtctattgttaccggtgattgtaaatacgaaaacggcgaatacaacggtagtggttctgacggttgtaccgttgcagtcacatctggtaaggctcaatttgtcttgtacaattaatcattggaacaaccaacttaggtaggtggttttttgtctttttttgcatttcactgcagttttaaggggaacaagaacagacgcaccggagaagagaagaacacaagtgtcttcttattttactttttcattttactttgttttctattggtttgattttttttttttactagttgctttcctcgtttaccatctataactagtctccgtattttaactttaaaaaaaaactaatttgcgctcccgtaacttactaaagagagatctcaccgctattacaactgcggcacgatcccttcttgctaagtatgtagatcagctaaaagtcatgcattccaatttaggacaactctattcacttaaaggactatgcttcattcaacgcacccatcaagaagcaatattgactgatccagaacccataacgaatcctaatcgggtaatccaatatcggcgaatgtctaggagaaatcccactttttgccaattttctatataggttatgatttaccgtggggggaatttattttctacaataagctctattctaggggaaattgccgattctctttactctttcaagatgttgtagttagttgttgtatcagtcttgctattcctctagcaaaagaatgatactttgattcacaagtgtttgcaggttgcttaagcgtctttttatttttcttcattccttttgttcttttttttaactctcgccgattattattcttaataagaacagcctcacagtaacaacaggaacaagaatgagatcaaggtagtctgtacttcctcacttgtgcttaacaccagagtttaaaaacctcatggcttataaacgatttttcgcctgaaatttctatcgcgtattcgtgtgtgtggagagggtcccttttctcgttattacttgtgttccttctgatcttttttttaattttttttgtctttccgttctactttcatctcttacctacttggttacttacttacttactttatttccttttctttttctctgaatttttttgttcttctttccgttcagtgtattaatactactactatattatactactatacccggtactagtctgctctattactaagtactgcaatactttgttttctctggtcaatttcattactctgttaagattgaacaacgatttgatctttgatcaaaatcaaagagaaaaaaaataggaaaaaaattgaaaaaaaattgagattgcaatcgaaatagagatcgaatcaagcccaaccgctcgttcttttggattgtcaatctggtgtagacatcatcaaaaaaaacaacgccaactataacaataccaatactttgaagataccattctttattctcctccccccatctcatcgcatttatattatagagcgaatcgcataaacttttaatgcaggagggaagtaaaagggaggaagatattattaaaaagattaattcttcaacttttcaacaatcgaggggtgatgccagcagtaatccagtaaaaactagaattagaaggcaaattctaaaagatttgggttttctacaagaaggggaacaagaagtggaagatgaattaatagctaacgacaaatgcttggatctttacttgcaaatacgactggaaagagaacgtaagcaaatcgagtcgttacgtgaatctaacctcgataggctaaatactattatagacaagtgcttacaatccgataaatttacaaaagattcattgtggaaaattttagacctaatttataaaccactgccgtctggtagtagtgctagttcttcacagcagcagcaagagcagcagcaagagcagcgaccggctcaaccgaccgtcgctctatcaccggacgcaaggaaaagaaaactggcatccccagtggtaagcccaaagggccataaaagattcgcatctgatgttccctcgttgggcactgtggcggcgacccaaccaccttactacggcgcaccgattcaaagtggtccaacaccttgggttggtcagcagtataaccaacaagcaccaccacaacaccaacaacaatatgaatttaaaaatacaatcccagctggtctgggtggacctgcaagacatcctcatcaagagaccattcaaactacaccgattagtgaaaaccaaccaccaacggctgcaatggcgcaacaacagcaatattttgcaggtcactactcacctgctcagtttgtcgcaaatggagcccgaggtggttatttcttacccgctgctacagctacagcagctgctcagagtggtagacctcatcctgtagtaatgatgcagtcagattcaccaacacagcgagcaccatctggttatttacaacctccgcaacatattccgtcatcttatggtagtaccataaagcaagaatatccgatgacaacaagacgacttcaaggtcatagacgttcacagagtgcaaatgtaccgacttttggtataggctcaacgaagtcgccatcgagggaattacatgcaactccccagaaacctgttaattttttaattcatacgccaaagcatccacctccggggtagggatcttggaaatgcatagactttatgattatgagtgaaaagagagaggttcttatattgccagacaaacaaagaaaataaaacgtcaagaaaaggagaaaatgccattataaagatacgaatatgaataaaatatattaaagtttataccctttttagttcaattactgtagtaaagattttaaaatattctttgactccgagctcatcacttttccgttttcaatgcgagcattgtgttgcaatcgatattttattggagctctcggagtagcagcatcaattcgttaacaaggcagtaagaaatatacaagctatacgagctatgtgtacagacactgacactaaggttgtctttgatagctctcagaaagattcgaatagtctgaaaacgtcggatcagaaatctgacggttcactagcaggtaaagataatgaatcggagataccttattctagatttaaaagaagagataaactgttattagttgcacaatgtgcatcaacaggtcttttctcatcaatagcagcctccatctatttcccagttttaacaactgtggaaagaaaattccatattactgaagaacaggcaaatattacggttgtagtttactatgtctttcaaggactttcaccttcatttatgggaaatatggcagatactctaggtagaagaccagttatcttggtatctgttctaatttattttgtcgcctgtttagggattgcatcttgcaatacttattcacaattaattggtttaagatgcttgcaagccgccggaatttcacctgtaatcgccattaatagtggtatgatgactgatattacaactagggcggaaagaggcggttatgttggttacacttcaggctgtcaggtgcttggaagtgcatttggagccctaatcggagctggtctatcttcccgctgggggtggagatctgtattttggtttctatcaattggatctggtatatgtcttgtaatttcgactttactgttaccagagacaaagagaaccattgtgggcaatgcttccattacacctaggtcaattctcaacagatcaccgattctggcgattcccgccgtgagacgagaattacatttggataatccagatctacaaacgttagaaccatcaccaaagatgaatatcttggcatcttacaaaattttacttacacctgaaattgatctcttgctattcgttgcagggttacaatttgcaacatggactacccaccagacggcattatcgttaaatttgagtaaaaaatacaatttatcagtcgcaaaaattggtctttgcttcttaccttcaggaatatctacattactgagtgttgtattctcaggtagatttctaaattggaattacaagagaagattagcactacataataattggcttcaagaacaaaagaaacaattatttgaggaaaatgacaatgatattgatagagttaaccaccttttagcgactgatcctcgttaccatttcaatatctttcgcgccagattacaactggcattctttactttagtcttatcgagtggtggatttgcagcttttggttggtgtatccaagtaaaggcgccactagcggctgttttggttactagcggtttcgcctcacttttttccaactgtattttaaccatgtctacaacattagtcgtagatctcttcccttcaaaggcttcgactgcagcaggcttggttaatctgttcagatgcatgctctcagtagttttcattgcttcccttcataagatgtcttcaaaaatgaattacggtggtgtctttacttttctagcagcattgactgcatcttcatccgttctgctgttaataccagtgtcgaacggtaagactctttcttatagacgtcgtgaagaagagaggagattattagaagatgtcgagaattgattagagataggtataaatgttgcctctgctgtgctggttcttctctacttgttgattaatgcaacagaagagcaaatacgaaaatatcggtattcaatgcactactcgaggtccatacactccgttgcttccaatttaatacagggtccgtatcgacattgtacctatcgtaccaatatgcaatggttttgaattaactacgaagtctcttcaacgatttcacagccgggccacgagaaaaaataagatgtagtactctaaaccaattcaacttcaccgcaccccccatacaattatagattaactatagttggtgtttgttatttaccttcagctgtaggcggtttattgggatgtctgatgtttgagggaatgatacacctttactacaagcgtcaatcaagcaaagatgaaagcagtagagcacaaggattaattcctttcaaatctttcaaatgaaggttaattactttactatattagaattttatctgcgtgataacattcttgttatttggttggtccttagatcaaggttggaaaattccctctgtgttggtggtttcatgcataagttcatatttaacaatgtgtacaatggccgtttctacagcactctcagtggatatttatccttaatacacccaagagcgtgacgccaaggcaaaaactaagcaaatcggcaatgatgatggcgattgattcataaaaaaaaaaaaaaaaaacaaacgatattcttattcaacctacacaattacaatatagtacagcagcagaagaaaagaagttgaacgcttacgacaacaatgaattctctaattatttataaaaaaagaatgacaggcctttaaatatacagtgaatagcaagtacggaacaaccggtgttcttattattcttctccatttgattcccctcattgagatgcacattgaacaccttcagcacctggttgatcttcgtcatcctcgtcgtaactgttggcgcttctaccaccacgtgtactactgtatttagctgcatcgaattcggataggacacaatcgtctacgtgagccttggatggaattgatgtcttctttcttggtggtaagatttcttccaatttcttcatattttccaaactggtgaagtggtccttagggaaaacgatattaaatttaaccaataggttaccgaaaccaccgtatttaagaactggcatacccttaccttcgataactttacgcataccaggagagataacttcaccaggcacaatctccaccttgagccaatcaccagaaacgtgctcaattgcgaattcaccaccggcgatagctgttagtagatcgatatcggcttcgtacactagatcgtcagaatctctacggaagtgtttgtgaggtctttcagataccacgaagataacatcacctggaataatatctggagcttggtcagcttcacccttgaaaacgattttttgaccatctttcatacctggatccacatgaacttccaaaatctttctttcatttgccactttcttaccgctacaagccttacaacggtcctttggattaatgatatcacctgtaccatcacaagcatcacactcggtttggaatctttggatcataggacccatttgtctagtgatgaatttcacaccttgaccgttacaggatgtacacttcttaactgcaccttctttaccaccacgaccttcacaagtcttacacaagatttgcttgttaagtgccaatttcgatgttctacccttgtacaattcctccaatgtgactgtgatttcatgtttaatgtctctacctctttgtggacctcttggtcttgatgcaccaccaccaaagaactgtgagaataaatcatcgccgaatccaccgaatccaccgaatccgccgaatccaccaccggcagcaccggcgccgctcaaaccttcttcaccaaattgatcataagcttctcttttctcagcatccataagaacttcgtatgctgaagaagcttccttaaacttttcagcagcttcttctgatggattcttatcaggatgatatttcaatgcagtctttctataagcttttttgatttcagtttccgatgcagttgccgaaactcctaagaggtcgtaaaactttgtttctttaaccatttttgtacgtttatgttgggatttcaacttgaaatgattatgttattgccacactctattgctaaaggactctataccaaagtgtttagtagtctggtaactttatatgagttgaaatttttctctataatatataataatactgaacgccgcgaacagagaaaagaaagaacaaaaaaatttttttcaacgattcagaagtttcaaactgtgggcagtatttcggacaatttgggtctggtctatcagtgctttttaatacgcagcgaatactgatcaatccggttttactaaagctgaacaatctttttatatttcagtatcaatttcacctgctcaacggttccatcttgattgccagaaaattttttttttttccttgagcgcccgacgttcgaagaaccttccagaagaaaaaaaaaattatgtggttgaaatgacaaatcgctagtgcgaagaaacatgggcggttgcaagagggtgatgtagaagagaatcttgctaaagcttgctgtagtattgcatgtctttaatataagacacataaagaacctctttccatgtattaacgctgtcacgtgatattcacatgttttgaaatatcagtcagttataagtgttacccggagtatatcaatatgctatcttgattaactcatatatcaatcttctgataccgtacaaatatacaatattgtaatacaatacgtatgtttcaaggggtatgccaagagttgcccctcgtctactgaaaaaagctctaaaggctcattctttactgccattgttattgcctgcgtgtagaagtatagaacaaagtgcgcaggagtttcgctggatacgcaatgagctgcccaatatgaagcaagtaaggcaagcttgtctacagagatttaaactagttcctctacagtacatactcggtaatcagccgtttggtgaactggacatcgtctgccgcccaggtgttctcattcctagatgggagacggaagaatgggtttgtgaattatccgaacggctcttgggttcaatggggccattgaactcgccgtttcccatatgggatctttgttgtggtacaggatgtgtgggtctcttgctacaaaggagactgggacctggttgttcattaactgctgtggacgtgacggatgctgctctaggtttgtgtgtggagaatgcacatcgtaacgatttagagaggccccgattaatagccactgatgtgctgactaagaaaatagttccagacagccgaatatcccttctgacctgcaatccgccctatatccccaagaaccagtttgccgccgacacttcaccgtcggttaaaaggcacgaaccacagctggctctgattggtgatttggagttttattcgagtcttgtgaatacatggatccaccacacggattcgttcgtttacgaagtaggagatcggcggcagattgaatacgtgatgcacggaatcagagatgaccctcgtttgcaactagaatggtgtgtagggtataggttggactcttccggctgtccgcgggtggtttacggatataaagcggagtcgtcacttgcgggagcgctcagcggctacggagatctactgtatatacccccgggtgcggggaagtaaaaataaaataatcaatgtataaatatcagtgagtaggaaggatttttatgataatattctatttactgtgtcttttgtttcttctcctctggtccgtttccctcatcttccgtttcgtgcgctggtggttcaggagccggtataacacgatgagcccacattagataaccgccaccgcctctcattgtcattagagggtgtaatttacctctaacactttgatatggtcttacacgagtttcggaaatggaaggcgctaagaatcgaaggtcagtgtaaagtgtgtgagtcaattccagtaaaatttctttgaactgggaatagcataccactggtcttgatccatgaactttttctgccagcaatggtactagtgtcgaaagttgtagggtgctagcaataatcagggcgtcgtactgagactttgttgataattgtacaatttcgtgttgattgtagtaccatttcaatctacgttgatatgcatttttctttccggctttcaattgacgagcctcttccttaggaattggtttgaaataggaatcaatttcactctcatttggtggttcgaagaaatctaacagcgaaacggtctttacatgatcattgataaatttttcactgtagttggagtatttcagaagatctagatttgcatgctcgttttcatgtagtacaacgatcttaccagtgtgagagctattattatcaccaccaaacatacgctccaacataaagtagactaataatccaccggtttcatccatgcataaatactggccttcggatctaatgttagcaacatttagcagcattgccacggtttcttctgacatatctaacactttttgagtatcgcctttttccaacaaccattgtaaaagaaaggatgcacttagatattcgaccgtgaagtatttggcaaatttacgtttcttacggttcaaatatttttcctgtgattgcaaggttttcttatggaatgcgctatgtgattcaatcattttggcaacgatctcttcacccgatatagattgacgttttaactcttctatttgttctgaagtcatggcttggatttcgttaccgatattgatcaggttcatgttattagcgctactgttaacatttgacaattcacttccttcagtacttccaccaacatcttcatccataattctgactttgcctaccggtgttctatttttgttcttaggatcgtcatcatttggttgagattgattttcataatagatctcaaattgtgttcccagtgggtatccgatgatatcgtccacttggaaggcgccaaatttacctaatgagacggatgtatgtggttttaattcaacaatcttccagttaccagacggtagttttagaatgacatgctgatcagctgtaatatgatgtagataatccataatggttgaataaaatatcctgaaaggaagtttcccaaggtcagcgcttgaaatcgactagtaattatcggcctcatcgcgatgagttgaccttcctttgactaactatttttttttttttttctttcttccaattcttcgtgggaatggacttgaaaaattttgaacaggaaaaaaaaaaaaaagttatcattcacaagctcatcgcatcgctttcaagagagtgctaaactaactgtagttaaccaaacagagttcagtgggaaggaagaagttcaagcaccatggggaatagacgtttaagtaagagacaaccagatcctcccaccttcgacgagttcaaatctcgtaaggacaaaaaatcaagcaagaagaaggagaaggtcaagagacaacttcctactgaggatggtgtagaaaagaagaagagtaagaaacaaaagagttctaagccagttgctgaaaaagtggagaaagaagaaacagaggaagataaattgccagaagttgacctcgaggaattgtccaaggcgaagaaatctttgttcgatgacgaagaggaagaagttaatggagattctgaggatgagcagttgcaagatgaatttgatttagaacaggaatatgatgatgacgatgatgaagatgaagcacatgcacaacagatgttctctgatgatgatgacgatgaagtcgatttggaagaattgaatgtcgacaacatggaatctctttctaaaaagttggatgaagaacaggcgcttgatgcagaggaagctgaaatggaattggttgagggtgaaagggaacaaccaaaggcaaatgttctacctaccgaagaagaagaagagatggaggctcaacaacagcctgatctaaccaccgttaggacgagaatgattgagattgttaaagtgcttgatgacttcaagaacttggctgctgaaggtagatcaagaactgaatacgtggatagattgattaaggacatttgtcaatatttcggttattcgccatttttggcagaaaaattgttccaattgttttctcccgctgaagccttggagtttttcgaagcaaatgaaatttctagacctattaccataagaacaaacactttaagaacgagaagaagagatttagctcaagcattagtaaacaggggtgtcaatttacaaccaatcggttcttggactaaagtgggtcttcaaattttcgactctcaggtacctatcggtgccactccagaatatttggccggtaattatattttacaagctgcatcttctttcctaccggtaattgccttagatcctcaagaaaatgaacgtattctagatatggccgctgctccgggtggtaagactacttacatctcagcacttatgaagaatactggttgtgtgtttgccaatgatgctaacaagtctagaactaaatctttggtggcgaacatccatcgtctcggttgtacaaatacaattgtatgcaattacgatgctcgtgagttccctcgtgtcatcggtgggtttgatagaatattgttagatgcaccatgttcaggtactggtgtcatcggtaaggatcaatcggttaaagtttcacgtaccgagaaggattttatgcaaattcctcatttgcaaaaacaacttctattatctgccattgattctgtagattctcattcaaagactggtggtattatcgtttattctacatgttccgtggcagttgaagaagacgaacaggttgtagattatgcgctgaggaaaagacctaatatcaaattaatcgaaaccggattagccattggtaaagaaggatttgccagctatagaggtaaaaaattccatcctagtttaaaattgacaaggaggtattatccacacacttataacgttgatgggttttttgttgctaaattccagaagttgggtccatctccacacgacgacaaccaaaactctgccaaggagaaggaagctgctgccgtcaaagaagcagtcgaagaaggtattatccattccgattttgccagcttcgacaacgaagaggacgacaaatacattcagaaatctcagaaacagaatttgttgaaaagaggtgtgaaccccaagtcggtaaaatcaaacaaataattattattataaataaataagttgttagaggagctaattgtacattacatcgttgacctatttcattactactattattattattactattattattactatttaatattaaacttttaattactcaaaatagtgaacgttccccagattatgttccttaatgtattcgggaccatactctaaatattcttgcttcgtaatgtaaccgtgtttaaagtcttcggtattttgagccaattttgccatacctctccaagcatctagggaaggatcttgtgacttccttatggagaagggtgatcctgatggtaagaactctgaaaattccttgacgatcctttcccttaaacctggaagtttagcgttaccaccagtaatccaaacattttgagccattgatgtgctaacatcgctcaattggcgttgggtagatccgaattttctcaggagtaaagtttcacataattcaggaataccagcttgatcttcaccacccatattcggctggaataaaacttcgggaactcttatacgttcaatgttcatatgcatttgatgttggtgatgaatactttcaccatcatgaggacgaggtcccctcaggaatagatgtaatacggaatttctccaatcgtattgagcatctagcgtatcttcttcagtgaaattggggtcgaactctaataggaccctttccaacgctacgatttctttatattgatcttctatcaattcttctagagcttctggtgattggcttatgtcgctgtaaaccatccagtcttcatcgttagcaccaaatgtatcgttagggtcattgtcgatggtagcttgttgtcttgtcctcttggaaccaccgcggccactatcctcagccaaagtggctaaatttttcattctgctttgagacatttgtgattttctatctttcatttcatcacgcatcttaatcctttctttcctctgtgagattaatttattaagcttttgatgcttgtccttaatccaacttgttaaatcgttttcacgccattgttcatcttggagcctttttttttcttcaatttgcgcagccctctctttctcctctttggccttatttctagcgtcttgactagctttcaagattttctgcttccttttttccttcagttgttcctcatttaattgttcgtctgggacgttcaacagttcaaatttattttctgtatcttgatcatcttcttcgccatcttccaattctgtcgattgagattttttgagtgacctttccaaattgtatacatattttttaaaatctctttcatcgtcgaaccctgaattttgcaagattgacaatacttttttcttgggttgatcctttaattgctctctcacttgagtataatactgaagttcttcctccttttgaatcatcctctccactcttttctgtttagcctgctcttgtaatcttttcccactttcctttctcttttctgcctgtagtcttagttcctcttcagtcttttgaggctgtacgacttctgtaaatggagcttctaggactacattattagtttccagattatccaatgaaaggtatttctctaattcctcgtcataagattgagaaacataacaatagtcctcatacatggttttatattgaaaaggtgaaagttttgttgggaaatagggatatttcagagacatcaagtttgtcaaatattctgtggcttgattaccaccccaattaatcctcttggactctgttaaaactcctttgccgtcaaccaccggtattacgtttgtatcttcattaccgcatccaatgacaagacctgtagaattgggaccgctgttgtggtagaacccaaagagactatcaataccaaaagttacgccaggaacatcaaagcattcaaatagaatttgataccaattggctctctgggattgaatagtagccaatctttcattgataactaaagggttagaaatcccaccatttgccgcaactcctagatggttgaaagtatattccaaagtatcctccacgtaatcccaattagtcactaatggaccgtcaaatgcacttttggcctgtactcgaaccgcttggtccaaacttgtatcgttaccgatgaatgtcatagtttttgccagcttacggtctctataccttgtaagtcgattaggaaaaatgtgagaaggatttggatcattaacataacctgctcttagcttacttgagccaaaatcaatggcaataggtacatttggattgtatgaggattggtcttgaaatggttctggctgatcccttaacgggggatcttcaagaactctaactcttaatggtggtagcgaattatctcttgacatggatgcagatgagttaaaggatatctagggaatctttctggttatactgaattcattacctctagttgtagtggtctctatagccttcaagtccatggtatcttatactcgtcaatagtgatttagtttctactttaaatattataatatttacagtattatgaaatactgggcgcttaaaaacggcaccaagtggtccattatttggattcaaaattacttgtagctttttactcctccctgaattatgggggaggagctttgggataaaattgagaagaacaggagaagaataaaaattaattaataaacttataataaatattgggaatgtgtgtcactcaatattgtggtctagttatttgacagtaaaggtccaaaagatattttaaaattcactgcatatttttctgcacgatctgaagcatattaaacatatcaagatggatggatgtattttaagttttgtatggaatattgtaagtacaagatttttttgaaaaaaagcttgggttaattaggtaaatgatatgtaaaggtaaacttaggagccatgagcagtaccgtctaaagacgaaattcccccattgagctcggacgacattgatagcttttcttacacattattacccacaaaccaattgttcttgcaagagaacaatcaacgccgttcgtttgcaagcatacttgggcatcgccccagtattttcaacttgtttatgtagcgtaaacactataaacaatgtaaacacgcaaaatggataaacctctcaccacttattccatgctggacctataggagcaactggaatcattatcagaacctcaacttgcttaccaacggctctgtaatctcaattctctgttaccaagagatgatgatcatcaagaaatccttaaaatgcgggtaacataggggctcttatgtcaaacgccgtaaacaaacaatgatgtgctgtcaaagcagtggaaacctacaaaacatccagtgaaaatttactacaatcccttttcagtacattagatcctctaccaacccgttatatcactgtatgcagtgatcgattgaaagtattggctcaacttaaaaagctttttttctcgttccttttcactcattgtaaccaccaaagaagaacttttcagctataaggataggcggcaatgggaatgttatgtggatcatcatctagtcaatcttccaagaaaccgattgaaaggaagattgtgatattgggggatggtgcatgtggtaagacctcattactgaatgttttcaccagaggttatttccccaaagtctatgaaccaacagtttttgaaaattacatccacgatatctttgttgataatagacatatcacactttcactctgggatacagctggacaagaagaatttgatagattacgatcactttcttactcagacacagatgtgataatgctttgtttcagtttggactcaagagactcattgatgaacgtacagcacaaatgggtgggagaaattgcagatcattgtgaaggcgttaaattagttttagtggcattaaaatgtgatttgcgtcgagcagaacccgaaaacactgcgattacaccaaatttaattcaccaacagcgaactgagcaatccagatcagatttggaacaaaatattagtggaattaactcgactcaaaatggcgatgtaattagttatgaagagggagttgccatggctaaaaaaattggtgcattgaggtatttggaatgcagtgcgaaattcaacaagggagttaatgaagcattcacagaggcaacaagagttgttatgaatagcgaaccaaggaataaagaaaccagagaacaagaagaaagcagcggctcacgttgcacaattatgtaacacaatcaaaaaaaaaacaaacaaacaaacaaaaaacaataagtaaatttgagatattctgaactttttctttctataatactaataatatcttttgttctatgtggtcccgtcgtcgttaccttccagtaaattattgaggaatcttgaaggtgtagtgccatgtttcttgttattgttattaacatttggcatttcaaaactggaggctgatttagaacgagagtgagaacgggagtgggaatgatccgagactccaaccgacgacctatttctttgatggtatctgccgtaggcctttggttttctttcaggcgatgctgtcctttcgggtctgtccaagaggttactcgaactctcagaagctgatggtaatgacgttaccgataaattctggaaatgattcgtacgtcccacactcttggattgctgattttgttgagcgacctccagcgttggtgaaataaacaatgaagaccgtgggaaatggctcggtacgaaatcttgcacaggattaaacctctcttgatatcctcctcctattagatcatcatccatatctgcatctgctacagtgtcgtaagaagtagaagatccaaggccgttaccaccacccagaaggccaattaaagatttctttggtcttgcatcatttttatcagaatggtccactaacgactggtataattctttttcatcgccatgatcgtaaagtccactactgggggtatctctccattgaatattagtctcatacatcgtctttttagcgactctacgggacatatatcttgcaacagcataccagagtattatgaatgcaaatatggcagcagcagtcccaccaacgatgatataaattaatccatctggtaagtgatttgccctccaaacgtttgggttcccatcagaagaaggtggtgtcactacagcagaatatgaagttttggaagtatgactcgaggtcttcgatgctgattgcgcaaacgatcctgacgctatattgggcaatgccctctgtaccactgtatgtcctgccattaccgagctacttctaccacgaaaagaacttatggaactgtgatgatagtattggtgatgtttattttagcactttcttttatatttttaaccttaatcattggttttcccagctcgccaaatatagaatggggaaattgatctgtcgaaacacagcttaagccaccaatcaagtgatcaagtgtttatgtaacctatatatgacggtatgattgcctactagtcttattacgataagaagtctgctacggtttgatctccagtaaatccggcgtctctgctttacctgtatcttgcacacctgtaaccgttagaacaagcgaacggcctacttgttctgtacttcttatgctatactacaaaatcctactatactaccgcatatatctcaaacctatgatgtacataccacctctaaacttttcaccagtggttagtaccgatgtcagcctatatagatctggatatccaatgcctctaaactacccattcataagggaccaattgcatcttagaacgattatccatgttggtgataaacaagatctgtcgccggaatatgcagagtttttagagcaagggaacattcagttccacaatatctacatggattcatgcagggatgacggattcaaagatagaatgaaccaaattttagaaattgtactaaatgtcgataactatccaatgctaattcactccggcaaggggaaacatagagttggtaccgttgtaggtattataagaaaattactgcaaggttggtcaatcgcaggcatttatcaagaatatgacattttttccggtgggctcaaaggtgaagcagatcttgagttcatcaccatgttcgaaactagcttattcattcggaaggataaaataccgggctttgtcacttctgtcacaacgtgagtcacagagaaaacttttataagaaggcaaattatacatttgttgtatcctaaacctccctcaccccatcacttcatcatgacctttgatttaactaaaatcgttagacctaagatttacaatctagaaccatatcgttgcgcaagagacgattttaaggatggtgtcctattggacgcaaatgagaaccctcatggtcctacgcaaccaggtcttgaaggatctggattgaacagatatcctgatcctcaccaacttgcattcaagactgcaatggctaattttcgtaatggtgaaaatcaccagtacaaagacttaccacagccattgacggcagagaatttatgccttggtgttggatctgatgaaagtattgatgccatcattagagcttgttgcgttcctgcaaaggagaagattttggtcctaccaccaacctattccatgtactcagtttgtgcccatattaacgatgttgaaatagttaaatgtccattgattaccagtgataactcattccaggccaacacagacgaagtcatcaaaactgctcaaaacgatccttccattaaattgattttcatcacttctcctggtaatccaacaggtgctaaagtggaaacctctagaattgagaaaatcctacagaattgggaccgtgggatggtcgttgtcgatgaagcttacatcgacttctgtggcggttctacagctccattagttaccaaatatccaaacctctgcgtattacagacattatccaaatcttttggtcttgcgggtattaggttgggtattacttttgcctccaaagaaatggctcgtgttttaaattcgatgaaggccccttataacatttcatctttggcttctgagtacgcattgagagctgtccaaccagataatctgaaagtaatgaaacaactgtcactcgaaaataaaagccagcaacaccgtctggtcaaggaactgacatccttgcccaacgtccataaggaacctattggtggtcttgacgccaattttatcttgttaagaattggcaatggtgatggtgataacgatttggcaaaaaagctatattacaaattagctaccgaatctggtgttgttgttagatacagaggtagcgaattaggttgtactggttgtttgagaatcacagtcggtactaaggaggaaaacgacaagttggttaaggagtttgctaaattattgactcaattgacttcaaattagcatcgtaaaacaatgtatatatattgtacagataaataaaagacaaatcgtgatcaagtttcgatgttggtacgtttctttaacatttcacccagttgtctcttagtgttcaacttcaatccaacttggaccacttcgatggattgaataccatttgcaacggcagcagatgattcctttggctccagagcacgttcatctttcaaatttaagtttcttatatcttctctcaaacgggcaatttcttgcagtaagttttcacgatcagcagcttctctggccagtttaacgacgtatgtgttactttccatttgtttgccctgaacggtgtaaagtttcagtatttgtaataattcttcgatgtgctgaatggtttccgaggtcttgaacattttattccttagttcagactgcttatccaactgatggtatctcagtcctccgaatgccttctgaaattcatgactcaatttttccaagttactatattcatctctaatgacaatgagcttgttctgcagggactcgatacctttttctgtcaactcagaaactttaccacttgtggattccacttggccatatagttccttcattggtttattcttttcagccaagattgtttgcaatttagaagcatctggaattctccactgatacatgttggtaattgaactctcatttatcttgacgggatgctcaaagcactgatcttggaagaaactatctagccctgagatattttccattagcacagaaagttctgcagacacatagtgataagttctctcaatggatttaagaataggatcttgtgaagaatacttgatattggtcacactcgcaccagaaaagtattccggcataggtttaggcctatattgctcgcccaaatatgcatcatcattttcaaaagcttgaatcttgaaatcacttagttcgattggattagtttgacaatcagcgtctcctgatgcagctttttcgacctgagtgccactgctcactaggaccggtggtgatgcttgagtttgaacactacgttcatgatcatcactggaattttcagcatcgacactgacagcagattctaccgtcttgagttgatccttgcgaccttcagctgccgcttttgcaccaattccagcgttctccaattcacctcgcgtaaaatcatctagcgtgtcataagattcctctctgctcactgcattcaatgctgttggtgaagaagactttatcctgtcaccttcttttttcacttcagacgtctttggttgactttcgtcatctccaccgtatccacccttttcgtcaggatgagagctaaccgaatctttaggagcaccttcaattgagttttcgagatcttctggtaaagttccttcattctcagaagactccggtgtctgagtttctgtccttttgtcatctttggtagaaatctgcaatttgaattcattgtttgaatcctctttttccttgttcaaatttggtacctgggagaatgtgaacccagttgaagatggtttatttaaatcattagtgtattgggcaaagggtgattgaccttccttggattttggttgctgagtgatacttggtgatttcaaatcattagaagaaagagttgcactttcctttattttagcagtcaaagaagatatagaagattctgatcttgctggcgtctgttcgactgtcgaatctgataaatcatcatcattatctggtgagcttttctttccagtggaagtcttttcttcttcagttgaatcttcagctttcttaccctccttggcattcttgtcttcttcctcttccttcttaccttctttttggcccaatggtgaaaacttctgtttacttggtgaagacggtgccgccgaagcttgtccaaaggaaggcctacttgtacttgctccgtacgagggcgatgtgaacactggcaaattttcatctttggctaaagctgcaaagggactttgctttttgttactagaaatgctaccaagcgtagaatgaccaaaagttggtttttcaggagttgtaatgctctttgcattaacacctgtagacagccgactgaaagaaggtttagtttcagctggaggagaagaagaagtagaggattcagatttgggttgttcggagatctcaagctttggtttatctgaagtatctccatctttcttttcagcgccaaacagagatttattgtcatcattctctttctttactaagttggcaaatgggctctcactcttggactggcccttggcaaaatttccaaatgaagaaccagaagtattcaaactggatgattcgaagggtgatttttccttaggaaatgcgaatgcaccaaagcctgtattactattagaaccaaaagatggttttccaaaagttgatgagctagaagttggaccattggtggtagatccaaaggatggttgaccgaaggacgattgaccaaaggatggttgaccgaaggacggttgaccaaaggctgctttcccgaatgcgggctcagatggcttgtcaagtgcagattcatttccggaggaggctccaaatccacttttgccgaagatatgctgaccaaatgctggagaggatgtgttggctgctgcaccgaatgaaggttttccaaatgctggaaccgaagattctgtcgctggagcggatgtgtcggttgctacaccaaatgatggttttccaaatgctgggactgaagattctgtcgctggagcggatgtgttggttgctgcaccgaatgaaggttttccaaatgctggcgccgatgattctatggaggtaccaaatgaagttttgccaaatgctggcgccgatgattctgaagatgactgaccaaatgcaggtttaccaaaagcagactgaccgaaaggagattggccagaagaggattgaccaaaggcaggtgtaccaaaagaagattgaccgaaaggagattggtcagaagaggattggccaaaggcaggtttaccaaaagaagattgaccgaacgatgactgaccaaaggatggcttaccgaatgaaggttgatttgaagtactagaatcttgagaaatggtagtacctgagtccgcttgtcccaggcctccaaacagaggcttcgattccgttttgttcgtttcgcctcccagacttaatccacctagagagtttactggatcttctagtttcttaggctcatctttagcttctgattctttgaaaggcacttcttctacggtctcctgagcgacaatcgattgttttaaagcatcgacattaaatttgccctctttaatagccgttgcatgataaaatccaataatttgcaggttaccttcgttgtttaaaacataaatcaaaggcagtttatctacagaatccacaccgggacaaggttgtgcaaccacaccttcagtgacgacatcaagagcgattcccacaggattggtatcattatctgtcactttactgatcggtaacactgctctttcactatcttgtaatggttgaactactttagcagaatcccaaattgtgatctcacttgaacaggaagacgctaaaatatttatctgaggagtatcattcagcaattgggacagtttctcatcgtaatacattgggtacctcagtacagaaccaaatgctggtgttatatcgaaggattcttggaacgtcatcttatcatcgtcttttctcaccacgaagatcctgtgatcataggagacatcttcctcatctgcagaaacgggaattccaaacaccaattggtactcttgtgatgccaagacagttatgctaatgggaagatattcttctttaatctcgtctaaaagctctgaaggcgtagtgaactctgaattttttgacaattgattccaactttgcaattcgaaaacttgtacggaaaatgatttgaagaacgcatatagtttatcctgaaacagatcaaatgctgccacattttctagcagagatgtcaattgcctttggaccaaatgtaaacctcttagttgaccattggaatcaagtgccaaaagaacgctatttcgccaaaatttcacgtagactaaatcacaatcgaagttaaacacttcactcggttcgcccaacttatttagatctaattcaaaaacctgagactgcttgttaacgtaaaccaatttctcgtctcgtattaatttgaccgctatcacatcatcaacttctctttcccatatgaacgatatttcagacttggcatcattttgaatataatctctcaattgctgtagtttgccaataacaattttattacctgagcacgcaacgtacaatgatctatgatttgaaatatctaagttttgtaaagatgcaaatggtaatctttcatcataggaaggtaaaatcgcagcttgacctagttttttaaacccaaaatcttctgatgttaaggtctcaatttcagaaccaatgcaggtcatcctgaatggagaatctcgataactccttaacctttacaatgtgaacccttgtgtatgcattaaaatgcttcaatattcaaatatctgagtacatgaaaaggccccttcgtgtaagacgatgctcatcgcaagaatcaaagatgaatggaatatctcatattatcgttaatatagaagatttagcaagaatagttgatgatagaatggaatttatatatgtctaattcgattcggtccattcaactgtttaagcagagaatgacaaagaaccacccaatttgtgaacaggttcagccaagttcagagcgttgaaagaagcaccaacacccaaagtgacaccagttctcaattcttgtttgtaagccaatgcaacgataccagagtcggcaatcttagtcttgatttgggaagtagcatctggcaagtacttagtagcgaattcgatgttgacgttagtcaattccttaggaactgaagtggccttggcaccaacttgcaagattgggctgacgttctggaagaaggaaacggtagtcaattgagcgttgttagtggatagacctagagagtagtcaccagcagagtaacccaatgcaacagcataacgagacaaagagccaccagtgatatcgtaaccgatttcagcaccaccgacgataccttcgtgagccaaagtcaaatcaccgacgaaggatgggcccttcaatagatcgaacgcacctctagcggtgaagaaaggttgaacgaagctaacgttcaacttagcagccttagaaacacctgggaccaaagaggtcaccaattcactcttcaaacctggagtcaagtctgccaattcaatcttggtgttcaagttgttggcatttgaccagccttgagtcaaagtcaaaccagtagccttgtcagagactctagtttcaacgttggcagacaaaggaccatccttgacggcttgcttagcctttagagtgaacttaacaccgttcttggcgacagtactcacatcgacagctgcattggtaccatgatagaaatctttacccaaaagaccgttgatatctttgccaatgtcagagaaaaatggtggagccatagtgaagagattatgtgtgtatgtgtgtgtgtgtgcgtacgttgggtatatgcgtctatgtgtttattgatagaagaaaagattcaaaagattcttttttttatttttttgccttcttcttttctacttgtgaaggaaatcgaaacgaggttaaagtaataaatcaatttatctcataaacacatttcactacgaggcaggtaaagatccgtagtaataaaaaagcccctccaatgtcgattgcttcgtgtctttcttcatgtccaatttgaacggttacgagacaaaccgttggatactgtaaattttttgttgggcatacgcgaaattaacgcgacgtcattgggcagttaaacgtaaccatacaccacgtgaaaaacacgtgacgcggattttatgattaattccggtcggaagaacaaatacaccggcacggctcatcccgtaaatcacattcattgccaattagaatttcagctcggcctttccccaggtaagagcaatcggccatggtcgttaatactaacaactatctgtcaaactgttacagatctagaggatttcaaccacttctttagttgttttcaataatattctgtaatcctgtcactaatctccatatcacgtgcttctctgctctccctcatactacaagaggaacttaaagtactactagcaacggaagcagattctagaagaacagggcgataaagagagtccaaactcctttcacttacaaacctatacgcgcatctccttcaacaggttttcatcccttcaggatttgaacaaccagaaaaagtttacactaataacaagtagaggagaaacttatctctgttatagttatatttcaagggagacttgacattgggacaggaaaaaagaagaatacaagcagtatcgtaagacaaagatgagcgatgaggatcacaagctcaccgtcgaaacagaaacggtagaagcacccggtgaaagtcttttaccatcgacaattcaaccacagagcataacgactaatgagaattccaatgaaaatgggaatatggattacgataatattacgacagctacgacaatgacagggatgaataacagtaataataatgtgaacgataataataatgtttctggtatttctaacaataacgtcaattctactaatagcaatatgaacagtaatgctaacaacggtagtagtaatgctaatactaatatgagcacgaatggttcaacagcgtttagagacatttcacctgcacattttgcagctgcgcacgcagctgctcatgcagcgacatctacacatcagccttcgtcggctacagaggccaattttaatcttatagatcataatccattatcgccacatgcgattcagtccttgaagaacaagaagagttcacttttaattaataatgatggtaagaaagaaagtttacccaacaatggtaacttgagtacgtctgaactgtcgagaagaagtaggaatgacgacttggaaccttcgcagatggctgctggagggcagcaagatcaaagggttccgcaatcttcacattccgcaaaggcagcaacagcaccacctgcaccgccaaaacaaaatgccaatttagcggggcctccaatgatccaaaggccatcactgccgttgatgaattcaagggaaattttattggaaaacgaaaagcaaaagagcggcggttgtaaaccaaaggaaagtaaagaacctgaaagggcaccaacaaatccaacaaattctcacaccgacaatgtagcagcctcagcccacaacgaggaggatacagattcgttgcataagccaacaaaggcagatttctttgcggctagactggcgtcagctgtcggtgaaaatgatattagcgattctgaggagacttttatttatgaaagtgcagctaattcaactaaaaatgccgttcccagcggtgttggcaacaactctatcaatgacaatagctataacaaatatccagattccgcacagcatggtgttgctagtaagatgagtgtaccggtcctaaataacaatgcaaagcttttgaatcgacttaagagtacaaggcatacaagtctcagtgcacttccagcaaatccatcaatgccattttcggctgtagcgccaactcctagccccatcgctaatacaggtacaggcattaccgcccactcttccactgatgatttaaacagcgtcaaatcttttgccagacaaaaccaaagaggccctgtcgatttacagagtgtcaaatcgttttcatcggagccaagaagtccagataaacgaatgtcattggtatcattagcgaagggcaattctgcagttgcaccagtaccatcatcgagaactaatacagggcctcaacaaccacaacaaccccaactcccgcaactcccgcagctaccgcaacaaccacaacagtatccacagcaactgccacaaccacagcagcagctatcacgcaagccttcaatatccaattcaactctgaggcacgtgtcagcgtcccacatgggggttccaagagctaaacctgagccaaccggatttaagagaaagcttcgcactactgcttccaaaatttttgatgcaaacggcgcaccattaagacgttatagcggagtacctgacgatgtcaacttggaggattacatcgaacagcatccgagtcaagatacaaaacgattaggtcatgatttaggtggtattgatgatcaacaaagtacaatccaggaagaagcggaagcagcagcagcagcagcagccgctgcggaatatggcggcgacgtcgatggagacgatatccaatccatgttcttctacaaccatcatggtaatttagaagcacgtccacaaatatcggactacgaagaagatggtgaagatttggaaaacaataacaaccctaacaataataacggcagccataaccaccagagtaacggtaataccacatatttgaacgcaccttatgggggaaacttaccatatgcgaacgagtatactccgctgaagccaaaaacacaccatgcaagaactacattaggctattcacctcacaatttttacacaaggaaaacatcatgggcaaaattcaagagtttcatatatttttcgtgcgttacctgcatgctacttacagtaggtttcgttctcggattcttactggcttcaaacaaagaattgcaggatttcaacatcgttttaatcgataacgtattatcaagcgctgatgaactcatattcgacgttaccgtcagcgctctaaaccctggttttctctcaattgatgttcaaaacgtggatctggacatttttgccaaatcttctcacgtgcaagaagacggaataaaataccgtgctggcagcagtactataggtgacgatgacgatgacgatgacccgccaaaccaaaaggaaacagtcttattggggactgcatacatgttagaaacacctttaagatttcacgggaatgtgctattaaaaagggattatgatgtcggtatttctagtataaaacttttggatcccggagccaaacaacaacaagagagcgatacacttgcacttttaaggttaaagccaaagcagcttgaagatgacgtttccaaatggaaaaacatcataaaacacgactaccaattgatagtcagaggcaatatgcgatacaaagttccctatggtggtgctaaatcagtcccagtgcaatctcatacagaagttaaggcctcgccctagggtattgtatgatctagagaatcctcaactgttaaagaagagccaaaacatcatttaagccctaaattcctggccctacttctcaccctagccctactaatgttctctcactgaccctagcgtagggctacacattccttatctcccgcttcctatttttatttttgcatttttcacttcctaagacacaggcggacggcgggcataatatttccatccgaacggaatattttttttcccctgtgcggttctttcttcattccgttcccggccctacggtatctgtactgggatctcgctgggaatccgctaaattaagcagcgaccgagtttcatctcggaatacaatatgttcgcacaaatataagcagctggctaatgacgattcaaaatagcgatgcgcacatacacaacacatatgcaccgttagttcaactgcaactgcaactgcaactgcaactaccaccgccaccaccactgccactgctacaacaagaactattgcacagaactgctcccttactactggactgtcttctgtttttttgccgcttcagtagtagtaagtcgggctgatctataaaccgatacctatacacacaacacaccgtcaatcatcatgtcagcacaggatccggcacggtcgccgaggtcttttcaagcaaaaaatactaagaatctctcactgaacattagcaaaccatctacagcgacagcagcaagaactacaacaggactacaagacacaccaataccaagacccgtcggtcttggtgataccaaatttaggagaccaactccattgatgagtcgtagaagtgatgccgccatatatacacagcgaaggaatgctaattccaacgggaataacaatagtaataatggtaatggtcctcgcttgcacagggtccattctctgtctctttctgtcaagactacggagttggaaccgcctgcatcaagtaaacaaatgtgggttctgccgcgtaagaaaagttttgacgaagatgtggaaaagtccggtgtgggtccttcctctgccgagaatgctgggaatgcttacccggatggacctctttgcgtagtttcaccaaatgtgtatctgtattctgaaccaacattagaacaggctctcaagtttgatctcgtgatcaatgtagccgctgaaattgcagatttgggaccgttaatacatcgaggtagcggtgtggaatacgtacgagtaccgtggactcataatactagaatcattgatgaacttccgattttaacggaaacgattcatttagcacaacagcgtggtctgcgtgtgctaattcattgtcaatgtggtgtttcaagatcagcttcattaatagtcgcttatatcatgagatatgaaaaactgccgcttaatgatgcttacgagaaactgaagtcagtagcacttgatattagtccaaatatgggattaatattccaattaatggaatggggggagacacttgatagtgagagtcgtttgatttcatcattctctcaagagactacgccaagaaccccgggtgaatattttaaaactaatttatcatcagctagtacgtgtagcagtactactgtggtaagtgaaagggagtgagtgaaggttgtaaaaggttaatgcgattggtggggttaattgaaatttgttatgttaatctgcaggccggtttatacgtaacattgtgaatttaaccaactcaacctgctgtgtgtaaggattatttaaattaagggaggaaccgtgtgttataaaataaataaagtataccatataagagtgaactcttagaattctgtttctaaataatttttaacagatttccagtcgttctcggtaaatttaacaattttaccttgccatttaccgcccttcttaccaccaccaccttttagagttgggaccacaccagatagcgaagctgcaatggtagaaattttttcaccagactccgaaacaatcaatactgatccagattctgttgatttttcacgtccacataatactaattgatattcatttggagtcttgcccaatttattggtaaattctttgaaaacctgtaataaaaactctaaagtaccatattcatcctttagtaagaatgccttaccagcttcctttactttggctaataatctatcagattcatatgaagccaattctttaatccagaattgttctcttttactagatttttgaatcaagtccctttgtctatcgatcttttcaggaatttcagattccaaacagcttagtgaactctttgctgtacctaccaatttattaaccgccataccatagttgaccacacgattaccacacataaaatataaccttgaattcgatcctcttatatttgtttgattcggtgaaattaaaattgatccaatttggttagtcctttgtaaatgagttccacaacatggattagaatcaatttcaccaatgtggatcgttcttaatacacctttttccaggtcgtagtcgtctggaatctttgaagtctgtacatctccatgcgcttctggtgttctttcaatgacagaaatttgttgtggattaatcgaaataagttcatttaccttatgagaaacttgttcaatttcttgtgatgtcaatttacgtggtaattcaatgtaattgaaataatcattgatttccaaagttggctttttagctgaaattacaccacccatcgaccatgataatgtatccaatttataaggttctgattctaagattgcactcagcagatgttgacctgtatgctgttgcatataatcaactcttttactttgatcaacttccacttcaactgtagtccccggatctatgtattgtcccacatggtgcttagcatgtaatccgactctcgaaacgtatgaaacgggaatcctgtcatttgaacattttagatatcctgaatcacttggttgaccgccaccttcagggaaaagaatcgtatcatgtaattctaccaaatacttgacgggatcttttggtttccccttaaccggttcacaagagataacagtagttttaaacccgttaaacaggaaagaattacgttgacaggccaatgcaccaacggttgttggtcttgttaatgattccgtaaccattcaagtgacttacgatcgttaatgcttgagaacttgcctagtttggagtactttcattgaacagaagactaactttttcaacttacacatatttaccttgcaacattatcaacatgactcaggtgtgaacctgtcagtcttttcataattggaattatatatgctgactgatataaattagtatggtttaaaacgttgcttgttgcttttcttgctcttgctatgcttcttcttgctatgcttggtttcctttggttcttcgacgacaacaggttgttcatccaacacattcaacagttgggagtaatcccagaactcgtcagtaacattcaagggtcctgatttgttctcccatgttttgacgctaccatcttcaccacatgagtagagtaatttagaattacgggcaggaacaaagacgtctcttacgacttcatcaccgtgtgcagcattaatatcaatcgcattattagtatctacctgttcaccttggaaaggcaaaatacgtagtttaccgataccttcttgtgaattaccacaagccacgtatccaggatgaatatcaacgacgtaatcacacccccaggattcacgaacatcattaaattctactggacgaggttctttagcttcatcagatttatcgttcaattcgtgaatggaaaatgtttccatgtgagagagggtgaatattctccttggtgctaaccaaccgcaagaatgaatcgacgcaaaatttattacctgatgcaatgcatcctcttcttctgcttgtcttaaatcgtaaatgtttgtatacccatcagtagatccactcatgagtacattggggtcacttggatggaatgcaatatcggtaatatcatcgtgatgtgaatccactagcgatctaagcggcgaatcccattttctaacatcatagatatgtagttctgcatctgatccacttaattctgtaccacatgctaacatattatgacgagaatctaatgacagaaaaggtgcatttttatcattagaaatagttgccaaacagttattagatcttatatcccatattttgacagcacccatagtagcagtagcataagtagattcattttcatgatcattattaatgagcttcagcttgttcacagcgacttcccctgtttttatgtgtgcaatagatttgccagtttgccaatctaattgatgaacttgaccattgcttaaactggccaaaagcgaatgttggtaggcaggttgaagattcaaacaccagttgttattcccaaatgactcagaattcacaagtgaataactcatcttcttcaatgaatctggagacgggtatttttgatcaatgaatggttgagatgagctggtaagcgataagctttcggagtcttgaaatttttcaatctcgaagagaagcaggtggagaaggggaagagatgttggataaattagagtgagctggttggtaattgaaaagacttcaggatcctttggaggaaattatttacaacctttgtttgatcgaaaaatttaaaaagaacagaaaaagaatggtctctagcgggttcgaaccgctgatccccgcgttattagcacggtgccttaaccaactgggccaagagacctcttaattgttgttttccgtcgattatgacggccaatttcaaatttgcacagagttatcaaatgataacatatatcgaatccattcccactaaggtgtgtcctcttcatctaagtcaccttagagccatttgaagtctcctcgaagtagttcgagcagaactgaaacatgtaggtagatcttgcagatcgaatctgggaaaactccgcccctgtaactctcgtagtcgtactcttcagcgtgaactatgtgggctgatccaccttcagctcaatcgtcaataatcttgttggattgttttcatcgaccattctcttgtctttgttaaacatcaaagggaagccgcagagcttctcctttctttgaaaaactcatatctattacaaaaacaagaactgtaatcgaagataaaaggatcctacaagagttttggtggtcgtggaaggtctttatattttgagctaagcgtcaattattcgagtgtcctttttccagcttttgtacgcctctaatatcatctccaattctattctttttcatcctttcaaatcgacacagtcggatccaaattgatattattgtagatgaatcatcccgaaattcctacatatacccctggtactgtattatctgtcggaactcatcatgcaaagattttgaagtatattgcaagtggtgggtttgctcaagtttattcagccgagatgtttcctgctgatacgcccactggaaccaataaagtatgtttgaaaagagttataattcctgagaaggctggattaaatgctctgagagcagaagtcaacgctatgaaacttttgaagggtagtaagcatgtggtttgttatatcgattcgcatgctgcaagatctctcttacaaaatggtacttacgaagtgtttttattaatggaattttgtactgcaggtggattgatagattttatgaatactaggttacaaaacagattgaaggaatatgaaattctgaacattatgagccaggtgactcaaggtattgccgctatgcatgctttacaacccccactgatacaccgtgatataaagattgaaaatgttctgatttccgctgatggtgaatacaaagtttgcgattttggatctgtaagtggtcctattcgtccaccaagaaaccctcaagaatttgcctttgtgcaacatgatattctaaagaacactacagctcaatacagatctccggaaatgatcgatctctatcgttgtcaagcaattgatgaaaaatcagatatttgggccctagggattttcctctacaaactctgttattataccacaccttttgaaaaaggtggtgatcaagccattttgcactcaagatatcaattcttggctcatcccatttacagtgaccgtctaaaaaatttgatcagttggatgttatcccaacaacccatgcagagacctaatatctgtcaagttctggaagaggtgtctaggatgcagggagtcagtagccccatgagaaatttttatctattgagagccatgcaacatacgaatacgagtacttctttcattactccacctgtatctatggtgaataccaatacctttatggctcctcctgcacaagtggctcctttaacgccagcacagtccttgggtgctaatggtatgcccgtaggggtgactcctcaacctatgcccatcatggcaaaaacaagatctggtatcagtactggtggtaatattttcccaggtgcagcaaatccaatggtggtacctactcagctgggacctgctcaagtggcgggacctgtaccaatgggtagccaagatatgtcctctggcatactgccgccttttaacagagctagcacattgccaacggatggtttctctactggtccagggaaggatggtggtgtaatcacaagtgcagtcaatactggcccagagacaataaaagataggccatttaactacgtggattctgaaactcaaacatctgatgcgggatctataacaacttcaaagccttacttacatccatcagcggtttcttctactcgttcgttgccagcacaaaatgcagaccatgattcaagacccagatcttccagtctggatttcaagagtgctgctcgcaagaaaccggctgatgaggaaatcctagagaacttgattgccttgtctaacagacgcgatgatcctaacaagcgtaatagtttcaattctttcaattcttcgccaataggacaaagaagtccaactgggggtgcaaacgttccaactacgcccgattctctagcaaggattaagagcaacccagatacaaaggagtctatccagaaaaaggttcaatcattactcaaagcagcagaggattcgccaaagaacaaaagtacttccgaaattgttaatataagaacgacaacatcatcattttcagagaatggtctcaggaagactacttccaacgtggagaatggcaagtcaaccaccaggagcatcaagactccatcctcagttaatggaaaatcggaatctaaatccaaaccacctccacctccacctaaacctgagcatttgagacctaaaaaacctcctaaaccagccttcctttcaggtaaaaggaaagagcccgaagttttgctaaatgaagttaaggatgcagtaatggattcgaatgttgacacaatagaaaccgatgtttagaaaaagatttcaggtgctttataactttagctgtttgaaatagacattcgaatcgtgacaagactaatcattataggattttcttgtgatctattcaatcttgtagcataaacttcatagaaactatcaaaaactttcaaggtacttctgtactattagcattatttttattacaatcattactacatgtacgattaagcgtgaaaatgctcatttttttaaactttttggcattaacatcttttttttttttttcttctattcactgtcactccattcttcaaatgaatccagaataaaatccgttgcttcatcaaacctttcctccatattattgtttataccatcactctcacaccttaaaactctaccaaatttccttcttggttttttattctcgttatcaacccaacaaggattatttctatccgaaaagactagtgagttcttgaaataccaatctcctagcgattcatcaacaagtggtaccaaaggttttagctgtttccttccaacgaagtttatgacggccttaaccactgatctggtatctctatggcccaataaatgtacgataccagaataagcatcaccaacacctacaaatgctactttcgataaggacgggaaatatttcacgaaattatcccataagtaaattaatacctcttgagaagttatcatagctgaataattgtcctgttcgaaaagtgattgaggaatgttcacatctatcacaccgtatttgcgtgccagcgaccatttaatgaaatctagtggagagtccacggtgatggacgtagaaggatctatcataccagttattacgtctcttttggcccaaatctcgggcgtatcatgcacaaagattataaccgttgattcctggaagacgtcgggagagcacaagactgtatcttcggggagttctagcttaggcacaggtaaggtgacaaaaccgtattctttttctaattgatggaattgttcttgacgtatagccttttgtaaagggaaatttttggttattaacgattctgtgactggctccttaaaattacaacctgaattgccaagtcttctgaaacatttccaatatttggattggacatgtattactttatctatcatttcaatggcctccaacttaggattcttagaaggatcaggcaattcctctggtggttcgcctatcaatatcttagccacactcaaagcactggttgctatagcatccaagttgtaaccaccttccagggccacgcataggttgcctctggccaatgatttgagcatatgcgtcatgtggccataacagctaggactcacgtggcattgaccaattgtgtccccatcagcggcatcaaaccctgaagatattatcaccagatctggtctgtattcacgagccataggcataacaatttgttcaaaagctaacatgtactcagcatcacctacaccccccacaggccatgtaatgttacaattaaatccttcacctttaccctctccagtttgatcatactgaccatgaatggtgcctggataatatttgcctaattcaaatctatgcaatgagatataaagcactctgtcgtcgttgtaaaatgccttttgtgtaccattaccatgatgtatatcccaatccaaaataagaattcttcttacgctctctgggtagttttttaaaatgttttgagctgctactgcaacgttactgaaaagacaaaatccaccagccatttcaggttctgcatgatgacctggtggtctaataacggctaaagcgtttttcactcgtccttccacgactgccttacaagcttcaatagcaccaccgcagggcaatttagctgcagaataagaatcactattgaaataaacggaatcaccagtctctgtctccttcaaaagttcttcacgattcatctgcgaggttttctcaataaattctagatgttctttagtatgcacctgtaataactcctccacagtagcttccctaactggtatcttaagcattaattcgccaatatcatcttcaccacttagtgtaggatcattaatcaacccattttccgcaagaattttatagatacgataaattctccttggatcttcaggatgtgggtcaatatactcaaaataagatgtaaaaattttggcgtgatacctcattctcacatcataacataaaccagtctttaatggagtgtagtgaatcttgggctcacaggcgggaacaatgatttgacgcttctgtctaccattgcttacacttgccacattaggtttcttttcaactggaccatttgggctctcttctagcttgcgtttagagccctcatcctcttgcttgactggattatcagtattcatgagtattaattctttgttgtgtgagttctatcaatttatggaaacgtaactcagttaaattcaagctgccgatagaaacctattcaaacctatgagaattccgagatttcccactacaaacagaccttcctgcagtacctgtatagatctatttgactaccaagctgctcgaagtacttcactagtattggtgaaactttatctgaaaagtccgtggtaacgagaaaaaaaaaattcaatagtggaaaaaatcgatgagctcgattcaaaaacgtaaataagaagtaagaaggcacgttagatcgtaacttgggctctttcatccaattcaccgtgatggatttctacagggactctacgtggattctagaatacttggaagccgaggagaagaagggcaagttgtcaggttcattgcagagcaatgtgctgaagacttgtactaagtacaaggttaagaataatcctaagcacatctatgcagtggtagcatcttgttggaagtacagaatgtatctggaaaggataatgcataaatctgggatcctgaagactattccacagaagaagggcaaaccagcattctcgaggttaacgataatgttattgtgtcatgaccttttgatatcgaagcaaaagaggattcagatgggaaagcatcctataaaggactacgtgttgaaatataagacaaggttacatgctgagttggtcaaattgaaagtaaagttaaaggttaaagagttatcggagttggtggatcaagatgatggagatgatgcgacgccggtaagatggattagaatcaatccattgaagtgtgacattcctgtggttgtcgaacagctgaacaagaagtttccacatcgtgttgatcattgggatcaattgtctccaggatccatatactacgacgaatacgtaccgaatctatttggtattcatccaagtgaaaagatcacttcccatgatctgtataagcagggcaaggttataattcaagatcgtgcatcctgtcttccagctcatattttgaatcctggtaaggaagatgtggtcatggatgcatgtgccgctcctggtaacaagaccacgcatctagcggctcacattataagtgctgcaggcgactcaaatggtggacaagcacaaatccatgcattcgaaaaagaacccgcaagagctaaggttttacaaaaaatgacttcacaagccggttgtggatctcttgtcaagattcatgtgggtgattttacccgattggcggtaccagaccaatttgaagatgttactgctgctcttgtcgatcccagttgttcaggaagcggtatctttggacgtaaatccttggagtcttcgaatgattcacaagatcaaaagttacaagatcgtctaagcaagctttcatcattccagttccaagtggttaagcacgcaatgagtatgcctaatgcaaggaaaattgtctatagcacttgttcagtgcatgcagaagaaaacgaaagagttgtaatagatttgctactggacagtaaagttaaggaatgggggtggcagctatcaccaagatctgaagttgtgcccacctggccacgtagaggcatagcagaagaattcgaggaggtattcagagatgataaaccaaaatgccaacttttggcagaaagttgtattagggctttacctcgagaagacggaggtatcggattctttgccgtatgctttcaaaggtaagttcatctagtgtagatttgttgtgtttacgtaacgatttaaattttggacaagatatcatcgaccacttgttgtgtggtggccttaccgcccaagtcaggagtattaacgtctcctttgattaaattagcatcaacagccttgtaaatgtcctgagcaggttcggggtgacctaagaattccagcattagtgctgtagatctaatggtagcgattgggttagaaatacctttacctgcaatatcaggagctgaaccgtgacaaggttcaccgataacaatttctggacccacgttagcactagggaccacaccaagggaaccaacaagagcggctgcaccatcagacaagatatcaccgtacaagtttggtgcgactacgacatcaaagcattctggttctctgaacattctgtagaccattgaatccacaatctgttcgttgtacttgacttcaccatatttgtccttgttcttctcgtagacatccttgcaaatctctctaaagagaccatcactttgagatagcacattagacttgtgagtaacagttaaagtagcatgacctctgctcttcaatctttgcaaagagatatccagggcaatagtagcaatctttctggtggccacctcactaattctcttgatggcttcagcaactctagttccagtagcttcatccacataggttttttcagtcttgatgtaaaggtcttcagtgttttctcttacgataatcatatcaacgtttctatcgttgcccttctctacggatttaactggacgcacgttggcgtaaagacctagttcctttctgagagcaacaattggtgaagaataacctgccaccttagtggtagggctttggacagcaccgaatagagcaccttgacactgttcttttaagaccttaacggtatcatcaggcaaagccttaccttgttgctggaaagcttcccaaccagctttcaagtcaataaagtcaaattgcaatccatgcttagaacccaaagcctctaaaacttgcttaccagcaggaatgacttctttaccgataccatcacctgggatcaacccaatcttcatagattttggtgcagaataagctctgcgagctgctaccttggctacacttgatctaaacattgctgcagtcagtgaggtgtaaatagaaccttaaatttaatcgatcatgaagactgctttcaaattaatcatggtcccttttatacaatcagttgactggcacccattagagatgagccggaattttttttcaaaaatggtgcttgggctttttcaaaaattccgtcgattcgctttaatagaaagcccatctaatcatacctcgtctgaatctgaatctgtgtaaatctaataatggcatgagtgggtttgaaagatctgaagctgaaattggtatggccgctcaagaatatgatggtaaggatgcaccacaggttgtagataattcccttatcttggagttttccgacgatagcgatgagaccacagatgaggagaccacagatgaggacgaagatgataggatgatgtactatgagagggccgttaaagaaattgctcgaggggatacatatgtttgtatgatctgtactgttgagatggattacacctgtaagatgtttgcatgttccaaatgctaccgagtatttgactatgactgtattcgggaatgggcccttaagtcaactggcaggactatggataagacttggaaatgtcctaattgtctcgatgagagcaacaaagttcctaggaaaagtagacctacgtgttggtgtggtaaagtggtaaatccagatccgaatccgttggatccgaattcatgtggacagacttgtgatgctcctatatgtgagcatggatgttctaaagtttgccatctagggcctcatccagagtgtactagaataattagtataaagtgtaaatgtgggaggcatacaagagatgtcagatgctctgaagttggtagtggtagaaatcaacagttcacatgtgaagaaagttgtggactattgctaccatgtggggttcacaaatgttctaaaaaatgtcattcaggtttatgtggtgggtgtaatgaaactttgcattcgaagcccgataagggcgctgtcattaaatgttactgtggattacatgaaagtccatccattagatgtggtgatgttcgagtagcagatagagattctgttgatgatcagggcaatggttggataggtgtgtttaggtgtaaagatgtgagagtcgttgaatatgcatgtggtcagcattcttttgtggaaagttgtaaaccggcaccttctttgcctaagcaaatagggtgtccgttttcacctaacgtattgagaagctgtccctgtggtagaacccctcttaacaagttgggccaagcgagggttaagtgcactgatcacataccaacctgtgaatccaagtgtggtaaaaagctagcatgtgggaaacatacttgtccttacaaatgccacgaaggagattgtatggatccctgtgtacaatttgagaaaaccaactgtctgtgtgaagcgaggagtttcctggttccctgccaatttcgtgaggatccacgctgtaacactaaatgtgaatctctgatgtcttgccgccgtcacaggtgtacggaaaaatgttgctcggggaaacctggcgctgaaagacgtaagaagaccccatttacatctagagagctgttagatgaatctctagtggaagctgaacacgtttgtttgaaaagttgtaatttgacgctgacgtgtggcagacataagtgccaaagaaaatgtcatcccggcagatgtccaccctgccttgagagtgatcctaacgacctggtctgtccttgtggcaagactgttgtagaggcccctgttagatgtggtactaagttaccgccatgcccttactcttgcattagcgttgtcagagatggatacccatgtggacatacacctatgccgcatctatgtcatccgccggaggaaaagtgccctccatgcactgctaacgtgaagaagccttgtaaatgtggtaagaaaagtgacgtgagaacactatgcttccaacaagatgtttcctgtggacagatctgcaataaaccattgggcagctgtcgtcatacttgtcaaaagaagtgtcatgatggtggctgtcaagtcaagtgtaggcaaatttgcggcaagaaaagagttaattgtgatcacaaatgtccaaaaccttgtcatggcggtgaaccttgtcctgattttccttgtcccttctcggtggtaattaaatgtgcctgtgggaggaaagaatccactgaaccttgtggcactaattctcaaacattgagtgcatctgttaccagagaactgtcctgtgatgaagagtgtgaaagagttaaaagatgcgcacaattgaaagacgccttaggcctaaaagaaaacggtgattcaagcgtggaaaacactgtgtccaatgcattagtagcatccaattttgaagaattggggttaccttttagagagaccgtactagctatttattccagacaacaaagatactgtgataacattgaatcggtcctcaacaattttattgatgacgaaaagaaatcaagtttgcattttaaacctatgaaacctgcacaacgccatttcgtacatgagttggccaaagcatacaagctttattctgagtctcaagatcctgaacctaagaggtctgtttatgtcaaaaaagaattgaacggggagagcaacaaaccttccattacccttcaagaggcattacctatttatcaagcattcaaacaacgtgagaaggaaacgaagatccgtcgttatgagatgcaaaacgtgactaatttggttaatttcgttccaaagtttgaacctacagtagaattggcaaaatataacggattcttgattcgcaatttaaccgatggaaccaatggagaagatttacagagaatttatggggagcatctcaaacctaccctggttagaaaccctgtttacaaggctttacctgatagaaatattgcattaatttttcctgaatcttattcagatgttacggtgaataccgaatgtgacatggaaagactggttggtcattttgattttatctgtaaggaaatgtttatcggtgatggtgttgaattgtgtcaggtgggtgaataccttcaacctgaagctcctacagagtccagctagctaacaaagttgtaatattccaagttgagcaattgatcctagtcaagaaaaactgtatactaatgtaatcttttaatgctactatttacaattgcaaacgttctctatttacaatacgtcgtatttcccattcacagatgtaattcctcggtctcttggccatcctcatcggatttatttggctctccttcttgtttctcttgtccccaagattctgcagggctagcacgtctagcggcaagcaattcagtctcttcgatagccttttgtttccacacgtcgataactctttgttcttgctccacaccgtaatcgattgccgatgaactgaatacggatccaaacatttctgcttcttcttgcgctacttgctgctctatttcctcttgcatcctcagacggtaaaattcaaatctagttctatcataggcatcgataatacccaattcaggatctttttgtaacagatatatggttctctgcacaacgctttcaccatccaatggtttacccaattgtgacatgtagctccaatcgaaattctcattgatttcattctccacaagcatcttgggtcttgaaaattcccatggatgctgctggtagaaaacttctctcaattgatcctctaagaattgtaattttggtgctttgtacaacctactatccatgggctttctatcaaaggagctatttcttgtcttataaaaacctttacgattaataccttcatcaaattctttccattggactgtctttttacctgtagaaggattaataaaccttgcttccctagtaaacttagtcgttgggggaactgaagctaccacttgataccatgcaggagtctccctgagcagtccagatctcagatacgcagaggtacgctctaatacgttaacagcattcgtctgaagcttcattatggggtgctttgatcacttctcagagttttaactatgtgatcttgtcattcattaatggtataaaatttcaaatttttcgaatctatcaaactcatctcggatagtttagtatgtggtgaaagggtgttaaaagtgaatattccataatatatggtataaggacttccgtaaggttttctacaaccatatatttggagtctagcggttttaattgactgttgtgggcttttaagcgctctcaaatcctcattttagctattcctcaaacattctatgtagcttatgaagtccgtagaaaatgagatatcgattaaaggttggaagttcaggctgaatacaatacacttgaagtacgctttaaagactagttagacgccattgaaaaccccttcgagtacgcttaggagtgtcagaagcgtttagatttagttccataaacgatttcatccttttcctagcgtgttttccaccctcccttcaattggtgatcataaagtccaatgtcggcacttttcaactttaaatcgctattgcaggtgatcctattgctactttgttcctgtacctacgtacatgctcaatggccatctctactcgatcgttataaggggcatggtgttttaagtgccttctggaagatggctcgtgtaggtgaaagggcaagtccttatgtgagtttagcatgtattttgatggctcttagccaactgaatagctgaacatttgatatctatgtgtgtagaatatttctatttctgttaagagtttgtagaggatttaacgttttgaaaatatggcggaacatttgaacatgcaaaatgttagttatgtaaaaaaaaaagtactaaattatttaaattcataaatttcattctgtccatgagtcaaaactgcagctctttttgagcttacaatacgttctaacgccaacccatctaatttactgtatacgcacctcacggtagaaatgttcaaatcggtatctcccaagaaagcgctcttaccaatgtatctaacgacttcgttgtaaaattcaggatttgatggtggttggtagaagataacacttttgactcccttgatttcgtatcgcctgaagtggtgtaatctttcagtgtacaatagaacttttatacgaccttgttgaaatagagatctggtagatgtgagttgtcttacatcggaatattcgttgatatcaccaaacaatatcgtagttttatcttttaggtagttcctcactctgataaaatcagcataatccggaatgtaaagcagaataccatcttcgtaacctgtagactttgtaatactaggaacaatgacactggtgaaaaatctgaaacgataatccggctcgtctacaacggaggcaccacctaaatcgaccctttggaaaatttgtcttactctaaatcccaattttgagacactagactgttcacctgtgatttgatggtggttcttccagcgtcccccaatgtttcgacatttaccatttaataagaaatttgccgtaggtgtaacatacctggtaaatatcaacgtttgtcttagtagtttagcctgctcgttaatgtaccacatgcgcactctaccgaaatctgtatcgtgctgttccttggggatcttgttcatatgggcaaaaatagtgaacaagtgagatacgttttggaattcaatagaattcaactgatcaattatcatcaactcaatggatgataagaaatcatcttgcctctttttacgatctgtattctccaggatcagttgcaatcccagaggtgaacatacaatcaaatctgattggtaaaaattgctataaagcctaatggcctttctcgtaaattttacaccaaggacgaaaaaatcgttagtattacctttgaaagtgtgtctaaaagacttaggtttcgatgatggcggcagaacgtcttcaaagaattgatccctcaatttactctttttatccacttgatctaatcccgatttttcaataaccttgcttacaatttgatatgccgtatctctggtaggtgctacaatgagcaccttcggtctggtaaaaccttgatccaaaaattcgccatctggattggttgctaatctttgattgtctttcaaaattctatctcttgtcttgtagatatgattcaaaacatgtaacacgtataaatctcggtattcatcttcatcttgttcgtaatcttcatattcgtacaataaatctctgtactggaaaattggatcgacaattttcctctgtaaaggtgtaagaacatcatcttgggattctaacaaattattttggatcttcagcttcctcttgaggggatatgaactcaaatgtcctttatgagatggtaattcgaactcttggcccttccctgccaatgttttcgtgtaaatcagagactcgtcatcgtctacacgaatcttcccagacttattgacaattttcttttgcttccaagcttcatctaaagaatcaatagactccgactgcatgttgaaatgactctcaaaaggatcacgttcatcttcactctcatcttcatcgccttcactcaactcctcctcagattgtggttcctcttcaccaggtgtatctaccaaatttgcttccacttcacccttctcatcttcgctaagttcatcatctgatgaggatgggtcttgtagatcctgcttctttttcctcctttccctttgtctatcttctggatgttcacttttcaaaatcgtcaaaagagcaccataagccttttctttcgaatcttcctgctcttgcacctcatttgtagcatcttcttctgaatcttctgacaattcaccatcctcttctgaagcaaccggaatctctggctcttcaacaggttccttatcatttctagctcttctaatacttctcaaatctttcctaccacgtttcctagacccatcaatcgcatctgtaccattaccagtacgcttaaccatgattttagcgctgtagacactcaagaccagctaacttatcttctatctcggcggctgttttacaatataatgtgtatttatatgtggttaggtattcaaatctgcgatgagctcaaaaattttccagtcactgtggacgaatgttgagacatgcgacgggaagcagctcggttgaggtggaaagagaggaaatcgttttcacatcataattggaggtctaataatgatcaagtaactaggcaagacgattgtagatcgagtgaatttggagggcttatcggtgtttaagtggcattggattgaggttaggcggcccctgtttctatacgcgtgggaggaaattgccatctgtaaatcagtgagccagttttaaagagataagagtaagaataagagtaataataagaatacgaataatagaagggaaggataggttggattaagattttttggattttaattaatactgttaggaagaaggaaaagaaaaaaaataacaaaaacaaagaagagacgagtttccctcacccatttctcaatactatgagttttgttgtacaaagtgtacgggtccttttggcctgtttttatctactgtcgatactgatcacaataccgatatcgtttaaagttggcgggctatactgtggtctttccttcacggtaacgcttttcaatctctattttatgtcaacaactctatcgctatttgttcgaggttacgctagtaggttttacgtgttttcaactgcaaccatctattattcacaacattgcattattgcctcattgttatacctgttcttgtcaggattttccaatgaagaattgaccaagattttagagagtggctcacagcctgaacaatcgttattagaagttttaaagagtaacccattttcagcccattccaattggattttgtattattactattattgttacattgtacaaccatggcaatggattctttcacattcaacggccttcttctcactttcggaaggttttttcacaattttagcgattcaagccgttggtgaatctcacagatggctgctatacgagataaattccaacatttggaacatcacatctttactcatatcaggtggagtgattaccgctgcattgtactatctgtacagaatatatgtgacaccagtttgggaactatccatacagacggcctccctattgggttttacactttcattggtatgtggattagggctctacggtattgttagtaagaatggatctgttatcgagagttcacttttctttgcgtacatagtacgttgcatctatgaaatttcaccaaaattggcaactactgcaactgatgaaattttggaaatttttaaagaagcatggcagaagcatcaacgcaattattccagtacaaataatctattatcctactatcacgatgtggttctcgatagcgctgaaatgatgtgggaatcaattgtatcaaaaacagttacaactagtgatccattttatcatacatcgatgttcccaccactaaggaagtttacagatatctttaaaccagttggaatttttttcaagaattttaccatttcagtaccgtcttccattgaaggtctattccaagtaactctgaagatggcatctgactctgtatcgccggcgatcgttgtgaatttgttctttagagtccttatcttctattccgctactaagattattcctgcattacagggtaaaggagatagacaattaaacaaatctcgtagaattatgaacgttctttattggtacagcccttgcatactaattgccatgtacacgcatttaatattgcaatattccggtgaactaaacagagatctttgcctatggggttgtaattcaatgtggttttccctaaatcaaacaaaaatagtcgtggactcttggggattttggaattggtgcaacattttttggaccattttagtgtatggaagtgagttgatcggcggcaaaaaatgaatcgagagcttgaaggcgaaggagagaagagaaaacccatttttttcctatttcctcataagacatatatttgatagattgcatactacatttgaaccactgtggcttctttatttttatgtctcttaacattagtattcgtttttctactttttcctgtaataccatataaagattcgacaagatttacagtatgactgcccctccaattcaatgaaatttaataatatcagattttaaataagcaagtctcttccgtgccatctagcgagttgagggctcagagcttgactctatgttgcaattgatctttcatcatttatcgaatttatctcttatttggagagggagtggttcaactgaaccttacaagaaaataatatcagtttggcatatttgactatgcgaaagtttactagaaacttcaaactgggaaaaaataatgaatccatggaccaagaaagtaagctccattgggttactcaaaggataatccttgagcaatcgtcataactatggtttggaaaccacaatggtttcccataccgaaaagcactagaccatctgtgacgatctaggtggcaaagcagataatcgaataaccatctacttaatgagttgatttaaacattttgaaatttttaaatctcattgcgttttccgcaagttgtcaggtcggagactttcatcccaaagcatattatttgaatgggggtacccatcccttttgcaggcttcgaaaattgacgattctttggtcatggattggtgtcttgggagtaagaggtaggaagtgtccattaaatgaaaatcgatgggctttttatattgaaatttttcaaaatttttttctggctcgaaagatgcgtccgaaagaaaccctaatcatcccggacagtccaattttcggacaccgcggttatttcggacaataatttctttcgaccttcccgagcatctactgatcgattgacctctgtataaatgttaatcatacaataggtaggcacagctcgaatacaacaagattcaactcctaagcgagtgctaaggttcccatcaggaacatgtccggtagctactggccatcaactcaaagaagaaaatggcaattcaccaaggagtcccttgccaaggagagacaaaaattgtgggtaatggaatgtcaattgtttcctcaaggacttaatattgtaatggattccaaacaaaatggtactagtcgtgttacgaccaaaaatattcccattactcataaggatctacactacgataaggattacaacctccgaatatactgctattttttaataatgaagttagggaggaggttaaacattagacaatgtgcacttgctactgcccatgtatatctatcgcgatttctgctacgagtttctgttagagaggtaaatctctaccttttggtaaccacatgtgtgtatttggcatgcaaagtagaagagtgtcctcagtacattagaacccttgttagtgaatcaaggtctctttggcctgaatttgtaccgccagatccgactaaggtcacagaatttgaattttacctacttgaagaactgcagagttatttggtagtttatcatccttatagtactatggaacaaattgtcaatgtactggaacaaccgcctttccatatgcaactgtcttcggaagatttacaaaattgttggtctttaatcaatgacagctatatcaatgatgcacatctaacatatcctcctcatattatagccatttcctgtcttttcataacgatttcaatgaaagcaggtgccgctaagaatgccatacagaattctcaaactaatatgcaggccatgagtgagaccgaagctagtctggcacaagctctcaagcatcaagaaattttcaaccgatttctcgcagagtcacaagtggatttagaggaagtcacagatactattcaagaattgatttcactttacgatcattgggataaatatcacgaaccgtggattaaattcctattacacactttatatttaagatcaccaaattcaaccgctaggtcatcatgattgtatacatttataagggaaaggtatagagataaggaaaggaatagtgatacaaacgttactacatgttgagacaagacagattttatcgacagttccaaatgcaaataacactccaaactggtattgtaagatcacacaactctgggatttttgttatgggcttcccacctgggatgttcctgtttgtggctgccacaacaagaacggtttattatacgcttagttattgaagagcagagaattagaaaacatcagatcttttacggactcttaacctttttctacctcgttagcgtctcaggtctttataaagtatgatgtaaccgcctatgttatgacagcctacaaaagtgtatgtaaatctgatggacaacagaaatattccagatatcaagttctctactccgatgtagtgtaacggctatcacatcacgctttcaccgtggagaccggggttcgactccccgtatcggaattattttttgcttcaatccttaattgaataaaaaggattaatgaatagtcagtaacactttctttattctatttcactttttctaatattagctaattaattgcttgactgatgaatcttttcttaaccagcaccattcgtgtagatcacgtagagggacaagaacatcacaccgagcccaaaccaggttaataggaaactgcatcttttataaaaaacttccaaagatggaattacttgtcctgcagccaaataatctgtaccaatcaacttgtaaccaaataaccccggtagcgtgaatgaaatggatgttgatccggttgcccccacaaatgccaggacagtagcgaacgaattgacatttagagcaagagcatacatcgcaattagaagtagcgccgtaataatataaaatctaccatcgggtatattcacatgagggctaccattgcctgctacttctaaatcttcaatttcttcattaccttgcgtagcaccataggaattgaccaatgatctactatcactatcctgcactgacaaactaatgggtctaacgctagatggtgtatttgggtttaaaggctcacactcttggtgtgattcagctctcttttcacgttgcagctgagcccacacgcataagttgttaaccgctatacgacatggatggaacagcaggggaaaagtcagcactaccatggatccaaggcaaaacttaccaatatgcacatagatagatgtgtcatcgtagttcaacataatattgcccaaagtgttactaccaaatgttaggtaacctgcaagcgccacagctataaagaaaactgttgcgatggcaattgatcgattaactacggctgtaatatttgtcatagtattatttctaagttcattgacaatactgaacaaattcatagaaccggtataggcgaaaataatgatactaaaagttgacataagccccttataatcatatactgaccaccaagagatatcacctcttacctcctcataacgtccacttgaatactcatacacaaaagttgaaaggatgagcagggataaataagcaagtgcgaagagaccaattatactggaatatttcaaactatccaattttttaagcagacaaagtggtactaccactaaagatgaaccaacaatccaccaatccctttgaccaccaaataaaccagggaacacatcaccaatgagaacaagataactcaaaccgacaccaaagcattgggttatcatagctaaatcgaaaagaggagacaatgatggataggtcagcatacataatgaaaagaatgaggaatccctagggtctatcaatgtcttggaacatttacctaaaacgaaaagtccaaatccagatgtaattgcagcgagtaaaatcaacagtacacctacaagtacaccatcacttttaaaagcatatggaatagccagtaaacctgcaccaacgatggtcttgaccagattgatcaccgaggacctaactgtccctgtaggctgcattgtcgagttaaagcgagactctcggtaaacatcgaacttcgaactaactatctatatatatatacatatatatatatatatgcaaacaaacaaacactacgtcaagtcacccgagggagagtgataggggcagcatgactaatgaagtagtaccgccagagaactttagccatgttgttggtgaaatctatagaagcagttttccacgagtcgaaaacttctactttctcaagcatcgtctcaaattaaaatcagttttagtgctgataccagaagaactaccaccagagaatgaagagtttttacaagaagccggaattcaacttttccaagtgggtatgagtggtaacaaggaaccctttgtcaatattccaggtgacgaacttacaagagctatggaaatcgtactaaatccacaacatcaaccgattctcatccactgtaatcgtggtaaacacagaaccggttgtctaataggatgtattcgcaaactacaaaattggtctctgaccatgatattcgacgaataccgtcgctttgcctttcccaaggctagagctctcgatcaacagttcatcgaaatgtacaatgattctgatatcaagagaattgcttctgcaaacaactggctacctatacagtggtaaaaacacaccatagggggaaacgacgtgacacgatgatacgatgcgacgatgccatgcacaaaacaccaatttcattttttttttttttttttcactttcttattttcttgtttatctattatatcctcatactactattactaccaatactaattatttttaccacaatttattatactagtgcaccagcaccagagataaaccgtctactgtacagtagggcattaagccctgaagcagcggttagtacaagcggccagacctttccgtaccgtactgccttaatagaccctctaccacctacaattaaataaagagtagaccaggcggccaggaaccctgcacctgactctaggtcttgatcatgaattatccatgcaccgagcgcattagcaccaccaaacagaagagccacacgtttgcttggtcccaaatattgcggcctagtaaacttgttgagcaactgaactctgcctgcacgttccaccgcatttgctggattctgtattcctggagacacaatcggtgttgccaaaaggagggctgcgttcgctattcccggtgcaggtgtggtagtatggctgtacaaacgagctagaaaggactgcttaggtagatgaccggtactattactggggttctccattgcgtagcgaacgttttaaggaaatagatataatgctgcgataggctggaaaaaataggtgaaaggaaagaataatgttgcaaccgctattgtctcgactatcggtggcttctttggtttatatactcttggtcggtaggtagatagatttaggtaagggaccgttgtgggtctaccggccaattgaccacttgcatacatacattttggttacatacgtgtttaccatctattcactccccgcctgccccttcagttcgctggtctcgtgaatgtatgtgttactactgcgaggtttctttctagagcaattctccacactgtacagaataattggagcagcttactattaggggtgggactgtcccaaatgacgtgtgggtcaagagactcgcgtgaggcttggcatagagatgtgtgggtgtgaaagagggaagcggatagcgggcgaaggtatgactgtgtatgggtgaacgaatatcagatcgatcggagcttgcagcaagagaccgagtattaggggtgatatgaagatagccgcggagagcagaatggagacaggccgctgagattagggggtacgagggtttctggcgaaagtagagaattggatgggtggcaaatcggtggagaaaaggtataaaaggggagatgagcggcagaaaaaccttgacctttttgcatgtcactgtgagcaaacggaacagaaactgttttggctctttttgaaaggaacgttatagcaacaggtatgtcaaattaaattttaatgggttgagtaggattatttactaacgttagtgagttcagagaaggcttggaactgctttcatttcagcggtatgttgagtaatctagtttcagcagtaaagttctagtactaacaattctggaaacagggactaaggggactaagagcaggcagtgacagtatatgtgctaacctgaagatgttgaagtagagtcatcagtaataacggtatcataacatgtccgcagtgacaaatggaaacaatgtggaatcaagaggttttggatgatagaatctcctattcttgtgattttgaaatctttttcttgcgtagccgctgatgttctgtagtaaacaaggcattagttccatcagcggctacgtttcttcttatcagggaaacatagcttgtgttatcagctcagagacttgcatgtcaatccgtgttgtgcgggattttgaagattgttacaaactagaaagatttcgggtcaatctaactattggtgacaatagcaacggctaactcgataatttcatcaacaaagtttcgagatacatctatgggctcagctgcatcgcataccgctggatcactttaatgtagtgagaggtttttcattaggatatcagtgcaagatgttcacgtcaagtcgagcctagtctttgccctatgttggccaacgtcatcaattttccagtgggactgcctagtcgacccgaaagtttaaacattggcttgacaaaattcgactgactttgacttcaagggatggagaagccggatttgggtgtttttcagtcccgagatttgaactacgtacctatgagagactatgaccgagaaagacgaaggaactcggaacgcgttaatctcagatttacccctgtgcctcatttagcgatgggtggattccctattaatttcaactctacaagggggggggggggggtctccaacctcttggtaataacgggaaaatgactgtcaaaggattccctatcactcatatttgaaaatcttgtttggttgtttactggcgggtttactacttgcccgatgcctttataatgcattgttttgatggaatacccgtcatgttggaacttaagcgaagactacataatcctacccgatatcagtcttcttgaataagtttttacccccacaagcgttgccattaaggatgcggcgacagcatatcgcttaaatgaaacttaagttgagttgggaagcatcatttcagggaatttgtatgcccaaggcaacgataaaacaacttgtcgagggagtggtgactgttggcgacgtacagacaatacccgtgagtcttgaacgaaagatccatggacatccctgacagccatttcgctaatacaatcaaacacagtaattcctaccatagaacctgttataatattgaaatatataattacacaacgttactgatgagttcccagaaccgcagcattatgagtccccaaaaattgattaaactacacttaggatctttcacctcttagtcttctagccaatttgatatccttcttttgaatagtaacacgcttagcgtgaatagcagccaagttagtatcttcgaatagagacactaggtatgcttcgacggattcttgcaaagcaccaatagcagaagattggaatctcaaatcggtcttgaaatcttgagcaatttctctaaccaatctttggaacggtaactttctgatcaaaagttcagtagatttttgaaatcttctaatttctctcaaggcaacggtacctggcttatatctgtgtggcttcttaacaccaccggtggatggtgctgactttcttgctgccttagaggcaagttgctttcttggggccttaccaccagtagactttctagctgtctgcttagttcttgccattttgtattcggcttatatgtgttgtttgtattgatttattattcgagtataagagagaaacagcaaaagtaacctattagtcaaatacatcaactccttatatatggtagattgaccattttttttccgttccataatccctccattttttcgttactggtatacgagcatgctcagattttcaccatgttctgtcacggctctagagaccccattctgaacttttcgcgtttacactaagttaacaaagtgctgtgtactcagaatttcgcagttctttcttacgcgtaaagaccattagaaatcatatataaggtgaggttaaatgaagaagatatcgagtcaatagctccttctcacagctgtagagaacaacaagaatatattatagaaatgtccggtagaggaaaaggtggtaaaggtctaggtaaaggtggtgctaagcgtcacagaaagattcttagagataacattcaaggtatcactaagccagctattagaagattagcaagaagaggtggtgttaagcgtatctctggtttgatctacgaagaagtgagagctgttctaaagacatttttggaatctgttattagagatgcagttacctatactgaacacgcaaagagaaagacagtcacttcgctggacgtcgtgtacgctctaaagagacagggtagaaccctttatggttttggtggttaaaatcgaaaaaagaacaaaaaacaacgaaaaacacaaaaaacaagcaatttatactatatatgctgtatattaatttaatctgattggaataatttttgtttaagcttcctttctactttgtttgtgtcgacatatccagaatgacgaccaccatctagttctgcatcgtcagccgttagcaaattcttccaacgatccatacattccgaagatttatcttctgtatccctttgacttgggcatgaacaacggcacccagaaccattttcagaagttgaatcataccagtttttaaagtatccacgcttatggcgaggatcgccttctttataaaccaattgtttatgaggagcattctttggacaatgagccatgacactatgttgataaccaatgtctctaaaataatggatatcttctacattcatagttaaaccaagtcctaaggaatgtacaggagcatcaccccaacgttctctccaaaaaccacccattttatccaaatactcaaaatatgcattataaattggattatcaaaagtatcgacacgagcaatttcaaaatttgaccagaagtgaatcaagttgtactcctcattttcaaatttatcctctacaatgggagttgatgattttgatcttctaatcaagaaattcaaaccaatactatcttctggatcttcacctttcaaaaaatcttcaatgataagtttttcaactagctttggctctacatccctgtaaaaattaacccaatcctgtaattcttgatttgacgtcttcaaaatgtagtggttcatagaaaataatttccaaagtgtcttcgtttttattctatattttttgatgaatgccattgtataacggaacaaattggggacggtagcatagatttcttcgatcaaaatgttaaacccatatttcttgttatgtctagccatttcgaaaaatggatcataagtaatatcacagtaaaaatcaacttcaggctctaccctccaataccactcgtgacgctgcactaatggatgcctatagaacgaacctgaataaaatcgacacatacgatggtaagatgcagacccaccgtaaagaaaccctctatcaccctgagtatctatcgcatttttaaatgcccttggatcactcgtttcctctggaatttgccacatatatttatcaacaagaccaaattgtacttctccacttacagcatttttaatttctctcttgaactcttcactaaagggaacgtcatttaggaatacgtagggataatggaaccattgattgaaacgtgattctaaactgtttacactatgcaaaactccgtcgatttcttcatttctggtcaacatgacaaatgtcgcgttcatctttgtataagcaggatccttcaaatattgcatagtgtccacacatccttcgtaaaatggcttatccctatcagaaccaatgtacttgtctgaagtttctatggggaaaacaacccccttgacgaaaactttagttaaaagtacaaataaaaatacaattgaagccgccagcgtcaggaagaactctctattatcggagatttcctcacaagctctcctaaccttcgctcttatccttagcatcttgaaatggtgacgagatggctacctactccaccacactagagaagatccacaacagacgagaccaataaatagtctccgtataatacaatagaatgataaaggggcgacctgactctaatgtagatcttatcagccaagaagtagatcactattggtattattttattttcgatattttttttccgtttcttttcaagtctcgaactgtccgatcaatttttttcgtttcgagataatggagaaaaatttatagcgatgggttaactgccaagacattttagcgtgttaaaggtaaagggtgtggatcatggccatcttaacgtaccgcgatttattctgatgtcttcggtttgaagggtgccggtggttggtctgtcatttgacgtatcatagcaatatcttcggagacttcatcttgattcaaagaaggtaatggaggtgcagatttagcagtatacctttgtgatgtcctatgttttcttctttcgctggttctattatcttgttccttttctccaaatagtaatgcatacagctctgcatggtcgcttatatcttgcatgaattctgaatcagaattgacatccgtcgaacgtgcatcctggcttttcaatgcagaaatgggaccaccaccaccagcattttgattattagtcccaccttgtgctgatgaataattggtttggaagtctgactcctcagcatggcttgccaaccttgacgttgccggtgcaccctttgtggctgctcttcttcttagggatcttctttctgtacctgtgtcagtagcactttcgttagcggaatcacctctaccagtaccagcaccaccgacctcatttgacgatgattcccatccattcgcaccatggcttcttgtatgtttctggtatttacccctgtaatagtcgatagcataggagtgggcattggcaacatccataagtaacctatcctcctgtagcattttaatcttatgttgaatgttttcgtacagtttctccttacacaatttcaccagcctttcatgttccaccttggccttctcaatgtcttcttggaactcaacacctgagcgggagactctatactcctcgaaaagacgtaatcttaccaattccaaatccctttcctcttcataatcgcgtaatgtcctcagataagatttattgttgccctggtgcagtgttgtcagatcagtttgcaatgcagtgagtctatccttgtaataggaatccttgtctaacacaaaagtttggtaaattttaccaactttagactcaatgttatgccttctcttatccttacgtgacacatcctgtgcagtttgcctttgactcatggttccttattcgatattattatctttttattgtagtattttgtaatgttatttgtatactgttttttatcaaactactgttggatataccactaataaaacacatataaaatcgccaagaaatcaagataattatggcatgggagattgtcgtgaatgactctaaactgatcaaagccatcaagaacgaattggaatcgaaatcccttttcgtgaagcccatatacagagaagggtcaaagagcgttattagaacaggtatcgatgatgcagatgatgaggtcctaggacgatatggcagttgtaagagatggtacgagttggaccgtggtgatactgatggtgggaatcaaatagtcagatacacaagaaagtacttgatagatcacaactgtctctcgcaagaattgatggaatttgtgccgctacgatatacgatatacacaccgctgttactgttcaacaattcggaaaaatcgtttaacaatgataattggaatcgattctttgcagcacacgatccccaggatttttttgccggattggcccaatgtttccctcaagtaacccatatagccatcaacatgcccatcgttgaatctgatacaatgaggagaccgttccaactgcaccccttgtatggggaattcaatggtaagctaagcgccaactactggctacatccaactcaacaggatttcgaaaataccctctggtgtcataccgtacaaaacggtattcaccagtactgggcccccatgttcactatgtttagcagaggtaacatcaaggaaaagaaaaggattttggacacgtttgaaggaattgaaggtaacgatgtggtagatttgtatgcaggaattggttatttcacattgagttatctaaagcgtggtgccagaaactgcttctgcttcgaattgaacccatggagtacgcaagcactgaaacgaggtgttaccgccaatggattcaattcagaaaaagtacacgtctataccgaaaataacatcaatgcactggagagaattaagaatttcgaacccaaagatctacgcattcgtcacatcaacctgggactcttaccttcaagcaaagatggatggtcgatagctcaatctattatccactaccaggactcattatcggatgaaaatcacaaggttactctgcatatccacgagaacgtccacgttgatcgattgcaagacggtacatttatccaaagtaccattgatcacttatcaatggacagaaatcacaactacagtgctacacatttggaaagaataaaaacatttgcgcctgacgtctggcatgtctgcctcgatgtcgacgtacatgggaagtcgaagaattaaacaccgccactacatttgtttttcttattatctaaagcgttaatcggtattatgaattgaattacggttggcacctgtaggtgccaaccgtagccggatgcaagcaggggaaaggtggtagaaaaggtaccatcgagataaatgttggcagtattgatcgctgaaattatcgtcaaacgttcacccataatttctatctttcaacattcacgtgattttctgacctttttaattgtttattcatagtaagaagagaaagagagattggaggtactttgaacccaagagatacaaacaaggaaaaaggagacaataatacaatagggtttctacttgttggtgatgtctaatcctcttgaggaattatcggatggccaaaaccaagaagttttgatcggcagtagtggtgatggtaacaatgctaaaagaggagaagcacatacagagatgtcgtatttaaatgcaagaccttttatcaaacctgaggtattggaattcagtagtccagagttagaagaaaggaacgagaatgcttttgtgcaaaactatgcattacaacagaataataatcagactcataatgatagcagttataataatagtaataatgataacaattatggtaaaaatggcgagccattgccaagtcttaataccaatgaaatgttcttctcaccttcttccacgtcttctcagaattggagaactccaactctaaaagtagaagatcatgatggttggcaagagatgttagaaccatcaccaatgagtcatcaagatgtacagtcatcacagcctttcgaaagtgataggagatttctaagcacttcaagttggcagcctgaaaatgatccatatacaagcgatctagactcagattttggtggtacttcaagtgtttatcataccccgaatttgactgcacaagatgcgacgattgcttcacccgcaatgtcctatctgacaacaggtgatgatgaagttgatgatttattaagtgttaaatcgggagtgagtagtaactcaaattgcatgttgccaaggaattccgatggttataagcatgttaccaatataaatgaattggataacttgttaactgttattaatgatcactttgacttagagcttaacgatttggggtcatcgtcggttcccagtaataatcaggagttgagaagagatatggacttggaaatgccaaaccaacaacagtcacaatcaattcagcctccacctgtaatatcaattcaagaatttcccgagcaacctattatgaataggaatgaagatcaacatttaccggaacaggattcttcaccttcaccagaggaaacggttcccctgcaacgacaacgtgataagcagcatgatgcttattcaaaccttaaacagcagcaaacacaacagcagcaaacacaacagcagcaaacacaacagcagcaacaacaacagcaacagcagctacaaaatatactgttgtgcccgacggatagtttatcagatgcgagttatgaggagatgcgtagtggcaggataaaaaaaagacgtgcatctcatggttcaagacggttatcaagggcttctagatcttcaagtgtttcacccgacgagaaagcaagatccctaggagaagatagtgaccgattattggaactagcagatttgcaactaccctctccaatacccagtagacaaaacagtaacaatagcggcggtgatactaataataatgccaatgatagtagtaatgattttacgaaagctggcggtaaatctatgggtgcactagaagaaggcgaaactttacagaatttatcgggaaatacaaagaaaagattatcccaaaagaatcctgctgcctttgcatgtgaattatgcgggaaaaggtttactaggccatacaatttgaaatcacatctgcgaacgcatactaatgaaagaccatttgaatgctccatatgtggtaaagcttttgcacgtcaacatgatcgtaaaagacatgaagatttacatacgggtaagaaaagatacgtctgtggtggaactctgaagaacggttcatcttgggggtgtggtaaaaaatttgcgagaagtgatgcattgggtagacatttcaagactgaaagtggtagaagatgtatagtaccactgtatgaggaagcatcaagagaaaaaggttttattccagatcttccctgataatggagaactctgtatttttttttagtagtatgaagtattttaaaactaatggttttcatcgttagcgcagctctttgtattaatattattttcaatcaagtatgtacattcagccaacaagaagtcgcttcgacgagggattagatgaaaattcttaatacaaaagtaggaagcacaacaagatctcgaggggatcatggatcagttcgatactaatctcagtgagagattgattgaacaatcaagatcaaattccacttcacaagatgagcaattagaaaaggctgttaaattgcaaaattattacggtcaactgttacatgaaaaatcgtctgaactggtggcagtcaacggtgtgattgttaataattcagaatcaatacgacctcaggttctacagaggtatctagatgctacaatcttacaggccaagaccgtaggtcaattggtcgaatcggcagatatactcgatatgaaattggttcaacatggattggtagagaatgctcaacaaacattaggatcaagaggtacgctgcaattaccgctaatcaaataccattttgccagccaaatctatgactccgccaatattcctgaaactgtatcagtcatcgatgtgatatcacagctacagttatttcccttgagaaagtttatggctaggactggtactaatattggtaatggtgaaggtgatggatacttgcaattccaactacgcaatatgtttggtggtggtgagcaattgagatttgatgtgacaaagggtaccaagactttcagttcttatttgatcaattacgctcaacctttgaacccatggtgggtttgggattcattgttcttcaagaattgtaaacagatggggaatagaaactctatcgaaactttattgagaggattccgtacgtgtttaagaagtggattttatggtgatagtgtccttaatcatgaattcttttgcgatgttgcattgagaaataataaaatgaattccctagatacttgtgatactctgctataccaagctggtgatgatgttaagaagtcattagggcatatcatgatttgggatagacgagataacccagtaagtgcgtctagggggagtctttttagatggtataacgaattgtcattgggaaaattttggaaatctcagatagaactctctaaggcacagagttggtttcgagacgattggctgaccgttaatggaactttgaagactggatacatccataattttcacccaacgtcacaatctctaaacatctgcgataaatttcaaaatggtggtggtaacgatgtccgtagtttccaatacatgggattgggacccaaggatatttatgattccattggtggtgatgcatttgtgtcgtacggtgtaagcgttttcacaagattaccattccataagatttcccactccaactttaggttgcattggtttttgaacggtggtaaattgatcaaccataacaattcgagtttacaagatgtgattaaaaacctttctacccaacactcaacttcgattggatttggtcttgtactaaagcacccagtggctcgttttgagctaaattttgcactaccagtgacttgccatacaggagattgcattaggaaaggtttccaatatggtattggtctatcatttttgtaaataaaatttccgtttgagaacgtcttatgtacataaaataaatacaaaaaaaaatcgaaaattaatcctaaattaattctcttgagtcagaatccagcggtcatgatgttttacgacttctggaataatcatctcttcaatagatttatgactgccatcgagtttaatccatgtaccttctctatttttttgatccacaaataccacttgtttattcctggtttgtaataaattaccaattaccaattggtgattatatctgtccaatgcctgcgtagatttgtgaattaaaatactttcgtctgtctctaatttgaaggatacaatcatggcttgtttagcccacgattcgactaaccttcttaaaaatttaggaacaggatctaaattaacaattaatttaccatcagaagttgttgtggaattcgattcagcttcgctatcaccacccttatccctagattgaatcttatgctcaggcaatctagaataaggaacaaaaaaatcacttacagcggctgccaaatagaaaagaccaccactaaaatttaataattttgcaacgctctttagagaccaaagatattgattgactgttgtaaacggaagtaataataattttttatcttccaccatgtacttgtcataaagacgtttattacgaagaacagtatctctaaattctggtttaatattaccattagtatcaatatagtccagaaattgggcctccatattatgtgtaaaaagtctgttaaaaggtgctaacgaaaactctctgtgaaggaaaattacgctgtatccattagctaaaaattgttctgcacttgatgcacctcttgtaccagcagaaaaattgtcaataaatctaactgtattattttctaggggaaccgttgtacctcccgatgttactaaaacgattttatctctgtttagtgatcgctgtaagccaataaattcctttgcatctttgattagatcttctaaatatggtggtttaggatttgtaaggaaatagcgatcttcatcactcgtctgcgctatggggaatgcagcttcattaattgatcgatcaattgcatgagatacctctgtaatagaggtatgaatttgcgatttactaggagagcgtggaaccattttgggaacctgactttagctcatcaatatactacaaattgttggtgggtaaattcatataatgtactctgtatatttattcgtatgcatgaactgtattcatcatacataccgtacattgtccatcgacttctctcgtaaatttacactattcagatgatcttcttctattgttataaccagaaatacctatttcttcattcaacaattaaaaggtctcttggcccagttggttaaggcaccgtgctaataacgcggggatcagcggttcgaacccgctagagaccattcttttttctgtataccgaaaagcagtagggttggcaatactgcaggagtctatgcagaggaaaggtgattaaatcccataaacagtaacctttttgtttttataagtttggccaaagccgtagagtcaacagcgttagataaataaaccctgctgtgaaatctgccaaacttggtagaaactgaagaatttctcttgaattctttcaatggcgatttcctgaattatgattgaataattagagagaaagagatctaacagtcgctcttctgggatctaagagtgctttgggatattgcgcttgagattctattcatgaattgttatgtagttttggaagccaggcaagaaaatactccctttcagacgatcgtgaaggtttagaactagtataagttccatcattttaaagaaaatgggattccataattgaaattgaagagcttgccagtaattgcttgagaatatcacaggttttacaatagtggatgatggagatttctacaattatgttaggggtgctttggcaaatggactgggacgaaggttttctcagtttatcagaaggccatcccggactggctcattacgtctgataatgctgctaatctttcaaacaattaccatggcccgtactttctataaattaaagtatggaaacagttaaagaataaaacgatcaagatactgaatctccggataccggatctggcatatggaataatcccaagactgatgctctctttataggagacccagaggagctaaacagattcctgagagttggattccggatccatgatatcactgccgataagaagcttaaaatgcgaatgaacagtttagcggacttggctacagaaggagttgagtcaacatttagaaaaaaaaattgaaggagataaagaagctgaacccttagtcttcgaagaggctgaagaagtattaaaacttaattctgaatttactgaaggtaaattgatggtgtaccagatatcaaacttattacgaaatattacaagttcgtgacagtttttgtactttttcaacaattaagaggtctcttggcccagttggttaaggcaccgtgctaataacgcggggatcagcggttcgaacccgctagagaccaaactttttgacaaattttcaaatttgtttcacatcgttttcaacgcaatgctgagattttcgcccgtttttttttttttttttttttttctttacttccttcctaatgttgatagacacgtctcatctcatcagctaaatagcaattaaagccgaagagagaggaaagttcttacaaggtagaaaggttctgctatagttgcgactaatatcactattaaggaatagaagaacttgacacaagactatctgtgatctagtcaagtctcccttctattcgtctttcatttttttttgtttttttgtttcatttcctgttactgttgttgttaataatattaccataatagttatcatcaccacccactactgttgttgttattattaacattatcattattattaacgttgtcatcgttgttttgtttttatttcgattgcttggaattcgtctgctattacaatactcacaaagcagaaacaatataacggagaatttcgaaatccatttattattatcatcagcagcggttataagtttttgaagaagattttacgctgtattgtattatatccagcataatattatcattcgaatttcgatttttacctaaattttcatgatgtcagaagaacaaggtccagtaattggtgttaatgccagtgttcctgttcaagaggaacctacagtttctccatcacccgaaagatcggacagtgaagaaagggaaactaccccagttgtacctgccaatgctactaaaggtggtagagaaacatctgatagagtcttgtatgttggtaatttggataaatcgattactgaagaagttctaagacagtactttcaagttgggggtcaaatctccaatgttaaggttatgattgacaagaataatgctcgtgccaattatgcatttgttgaatacttcaaatcacatgacgctaatatcgcactacagactttaaatggtaagcagattgagaataatgtcgtaagaatcaattgggctttccaaagtcaacaggctttacctgatgaaaacacttacaatctcttcgttggtgacttaagtgttgacgtcgatgatgaaactttgtgcaatgcgtttaggagtttccccagttttattcaaggccacgttatgtgggatatgcaaaccggtggttctagaggttatggatttgtttcatttggtgatcaagaacaagctcaattggcaatggactcaatgcaatctcaagagttaaacggtagaccattgagaatcaattgggcatctaaacgtgaaaaccatcacaatggcaaccgtcgtggtggtcttgctggtaaccgtaacggaggcatgcgtctattccctaataataacaatggctttggtagaggtatgcctatgccaccaccaaattctatgggtatcccacttgggggcacattaccaccaaatgctcaaccaatgggtgcaccaccatctggtcctgccccaacggttccacctcctgtgaacccacaagctgtggaagctatgattagaagagctccaccaagagttactacctcttacattggtaacattccacattttgctacagacagtgatttaattccacttttgcaaaatttcggtttcatcttggacttcaaacattatccagagaagggttgttgctttgtgaaatacgatactcatgagcaagctgcagtttgtattgtagctttagccaatttcttctttcaaggacgtaatttgagaactggctggggtaaagaaagaactacatttgtaccaatggcacaaccacagcaaccaatgatgatggcagatcaatctcaacaacctattgagcattagaaattacagtcacaagactttcgaaaagaagaaaaaagtaagataaatcataatataagtcataaaataacataaaaaaattccaagaaaccattttccgagaaatactgaaattctgtcatccctgtagaagattatatgaggacccatgagtgacaaataattgtgtaaagtattaaggaactataaaatatatctatctgtgtactgactgtgtagaaaattcgatcccgtttacagtgatttggagaaaaaaatttggccgaaccaccaagagcatcgaggaagacgatcaaaaggaataatcccagcttgaactaattcctaagaatatcaattatatcagattcaaggggatactgataaagtattatggtattaggacagctctaatcaacaccatttaagatatattttttcttatagttgtcaaaaggaagaagtgggtaaaaagctgttctttacgtcaaataccgttataaatcattatcgccatcggcatcatcattcatctatcatcaatataaccatctcaattcctttgtatgagttttgttttgggacctatagtacaaaaaatctcctcattcatttcaaacaacaataataagactagcatcccaatcgcattaggtatagtaattctatcgactgcatttttatttctaaagagtaagaaacataattctaacgtaggtgatattgcaagaggaatgacatcaaaaagtggatttagacgttggatgcctcgttctggtcaaatggaaaatgaagttttgaaaagaggtggtaacatcggtgggttggtaaatgatggtaacacctgttttatgaattgtgttttacaatcgatggcatcttctaaagaacttctgaaatttttagatgaagaaattgcatgcaaagcaaaattggatgaagatcaatcaaacggagatgatgttaataatgaaaaacctcataatacatcaaaacaacaacagaagcgagaggaagaggcaaagagtgaaggtgaaaccgttccagatgttacatttagcgctgcccttaaggagttgttagataaattgaacgccaagtattaccgtgacagaccttattttaaagccaacaaactcttgaaatcgatgtctaaagcgcctaataaaaatattttattaggttatgatcaggaagatgcacaagagtttttccaaaccatgctttcagagctggagaaaaatgcaaaatccttggataacactactatagataaacatgcaatccttgaaaaggatttaccagaaaccgctgtcataggtcaagcacgtctagaccatgtgggtgccgtctatattccaaccgaacaagtgactcccaatttgatcccacccggtagtaaagaaaagtattttaccaagtttaaattgattacaccattggatggtattcttgcagaaagaattggttgtttacagtgtggtgaaaccggtggtattcgttactcagtatcatctggattaagtttaaacttaccaagtgataatatgggatcatcgttaaaattatctgatcttttaaaggattacattaaacccgaaattattgaaggtgtagaatgtaatcgttgtgcattgattgccgttcgtgaccatttaaaggaacaattacagcaatatgaagataaaaaggctaatgcaatacctgctaaactatgtcaggcattccagtccagaattcaagaattggaaaaagttttgagtaagccagttattgatgatgaagaatataaaaagcttcacacggaaaacatggtccgtaaatcttctaagtccaaacaagtgctgatatcaagaccaccacctttactggcgattcacatcaataggtccgtctttgaccctcgaactttcatgatcagaaaaaataatgctcgtgttcttttcaagtcaagattgaacctatcaccatggtgctgtgatatcgatgagattaatatggatgcacgtatgcctatgtctcaaaaagaagaagttattatggattcaagcgaagatgaaaatgttggtggtgaattttacactaaattacatcaaaaatacgaaagagaatttgaggatagcgatgaagattccgatcaacccattggtagcagtgatgataaacttgttagcaactatgatccattgggtggtgatggtaactcgctatcatcgtactcagatgaagaagagagtaacgaatctgattacatcgaaaagactgatgcactcggtaatacaattagagaacctagggcaagagctaatgataaagtggaagttgcagtccgtgaaaatgcttcaggtgcttcttcatctgaagaagaagaagaacctgaagataaaaatcaagagatggatggtgatgatgaagatgagagagcatcagcgccacaaaacactgaaagtgaaggcgaagatgaaggtgaagctaccaatggcccactaccatctaaattttctgtaccagctactcccttaacatactcgctacgttctgtagtggttcattacggtacacataattacggtcattacattgcctttagaagatacagaggttactggtggagaatcagtgatgagaccgtttatatcgttgatgaaactgaagtattgtccacaccgggtgtctttatgttgttttacgaatacgattacgatgagagcactggtcaaacaaagcaagaagattggcaacttgaagaagaatacaatcctgaaaaaatagaaattgctggagagcctgaaagcttatcatgagacagagtcaattaattgaattaacaaacaaagcaaaaattaaagaaaaacaacataaaattacatattaaatataactattacttatttttttattttgtctattaattacatatgtttttttgtcttgtctctctaatcatcatacatgggcctttgggcgttgatcattttcatcatcatctgcactgatcagttcgtccaaatcgtagtcgtaatggttggggtcttcactgtaattaccaataaccctcttcttgagaccagtcttagaatctatttcaaatccgtgagaactggatttgccaatatctttttcactagaaagcttgaatttcaacctatggtcattactagtccttgagttcttttgaccaatcttaaacccaccaacacctgaaagtgttggcagcaagagggcaaaaattatgacaaagatgaagaacaacaggtagaaataaaaatccatgactgattctccaagcctttgaatcgaataaaaatccacttttgacttcgattgttcaactcgcgatgacttttcaaacttaacttttttcacgcattatcatataaaagtacgtagctaagatcaagttccttatacactggagtagaacccatcagcagaaggcctaatccagaaatgattcgttcaacatttgttagagcttcaagactcggtagaacttgtactgctgcatcagcaatccgtagagcatcattactgcctattcgcaaatggaattacccacacccacaactgcatgctcaaagattctacgcagaatcgttcaccttaggtgatgaaataccaccagaagtgactaatttatcttttcaaacgtaccatgagcaagccgatacgtttttagaatcgctctcagatcaattagaagccctgagccagaagtacccggaaagtgtgcctgacgttgaattgacccaaggtgtcatgcaattggaactaggcggaatcggtagctatgtcataaacaagcagcctccaaataagcaaatatggctggcatcgccagtttcaggccctaatcgttttgatttctacaagaacgaatggatctcactgagagatgggtctaaactactcgatatattgaatgaagagattaatcaagcggttacagaggagaatgtaactttaactcccagtgactaataaaccgcaatgatcaatactcctcttaggactatatttatacctatatacatatatatatatgtaattatctcgacgatgatgaacgaacggcgctagctcgttgcggacgacgagggttgcaggtataaaaggggagctagatcgaggtagcagagtacacaactcctatcaacaataataaccttacgaccatatcgcacaatatttctattcaggtatatacattcaaatttgaaaatggctggtaaatcatttatagttacattgaaagagaacgctccagatgctgacgtttcaaagtttaaggactccatcaaggacttgaacggttctattactcacgaattttcgctgatcaagggttacactgttcatttgccagaaaccttgcacgccaataagctgaaggatagtcacaattcgattattgccaatatcgaagaagacaaggaagttcatacacaataaggactgggtcggaagtattacggaacggaataggtgttgaattatttgattaattaggtgatataacagtatactaagattaatagatttaatcactggctctatcaaaaaagaggtaaaggtgaagggggatggaggagcctgagtatgtaaaagggtactatacgggtatagcggctgcatatgacacgtgatatatggtcacgtgaatatcacgtgtctagctgagtaaccccgccccctgtaaataaataaggggtgggcagaaataagcaccttttacccctaaagctactataacaccaacgaagccaactctctggtttcaactccattagacagtagaattggagaaaccaaattttattgatataaaaggtgacccaagatttgccacaattgctagattccccagatctgttcgacgagtttgctaaggtatagtgtagtcctatccctaggttctcaatcgctatgcccttaaaacagattaatcacgacccccagtttaaaccagttaaaagtatctatgaaaatcgtcttagacagttcattgatactggcggctacaaggacttgaacctacctaaattctacgataagcaaagaattcaccaggatggcgaatatgttaaaatttggtactaccaaattccctgggaaaagggttttgacccaactgctccaagtgtgaggccaagttggaaaagtattattgatgctgataagaacggggagatcaaatggaaaaatacggctgagaaccaaccatttggtccttcttggacgacaacctggtttaaggtcaatttgagtattcctcaagattggttagattctggtgatcagttgacatttgaatttaactgtgataatgaaggtattgttatcgatcctgagactttagtcccctataccgcattttctggtaacgagagaaaggagtatcacttgcctcgtaatggtgacggtaaatatttcttttatattgaatgtggtaacaatggtatgttcggtgttggttcaggtggcacgaataatgcgccagaccccaatagatatttccatttgaaaaccgccgatatcgtttggccagactgggatgcaagagctctttattttgatttttgggaattaagtgatgctgctcgagaattaccggatgattcttggcaaaggaacagggcaagacaaattggtaatgaagttatgaatttgtttgaccccaacgatagatcgtcggtggttagatgtcgtgaattcttgaaaaaagagtattacgacaaatataatgacagtgacaaagtttacggcaagggggattcatcacttttgcctaatgtttatgcgataggtaattgtcacattgatacggcctggttatggccatgggcggaaacacataggaagatcgttagatcctggtcatcccaaaccactttgatggacaagtatccggagtatcagtttgtcgcctcccaagctcaacagtttaagtggttaaaggatgaacatcctgaatttttctacggtagtttggttcccaaggtggagcagggtcaattttatgctgtcggcggttcctgggtggaaaatgataccaatattcctcaaggtgaatcgctatgtagacaatttcttttgggccaaaggtttttcatgaagcattttggtgctaaatcaaccgttttctggttacctgatacttttggttattcttcacagattccacaaatttgtcgtacctctggtattgaaagattcctaacgcagaagttagcttggaataatattgataacttcccccactctacctttaactgggttggtattgatggctcacaagtgttgacacacatgcctcccggtaacacatatacctctgacgctaattttggtgatgtcttacgtaccgccaagcaaaacaagactcaggaattttacgaaccagggttgatgctttacggtaaaggtgatggtggtggtggccccacaaaggaacaattggagaaaatgagacgtatcagatcgttgtacaaccgcaatggtaatgtgatccccaaattacaactgggtctctcaattgatcaattttacgataacattttggaaaggacccatcaaggtgatgatttacctgcgtgggttggtgagttgtatttggaattccataggggtacttataccacacaggctagaatgaaacagttgatgagatcttcagaaattaaactacacgatttggaatggatagctaccaagacttctttgttataccctggtaaatataagtatccggcttccaagattaatgacttatgggaaaacgtattattatgtcaatttcatgatgttttacctggttcttgtattgaactagtttacaagtatgaagctagacctatgttggagaatgttctaaaagaagccgataaattgttacaaggcgctcagacggttttgatcgataatgctgtcaagagtaaagatcaagtgtcggttggtactcttgcttggtgcaaggaagatttgaaagcagatgcatctgattttatcccagccacttgtacagtggaagatgattactttgttctaaacaacggtgagttgacagttaagatcagtaagcacagtggtgtgatcactagtattgttaatgaaaagacaaagactgaatacattgacaacaagcatggtagaaacaagctaggagctaatcaatttgtgttgttcgatgatgaacctacatctttccccgcttgggatactgaattgtactctgtgaacaagtacaaatacttgaccaaagttgagaagatcgaggtggtgtcgtctacagcttctgctgttacggtggaggttgttgtgcctgtaaggcaggattgtaaattgaaaacacagattacgttgaagggtaaggaagcaggtgtcaccgatgagagtaaagtggatattcacactaaagtggaaaattggaatgccttctaccaattcttaaaagtggagttccctgtcaacatcatcaatgatttcgcctcttacgagacccaattcggaattactaagaggcctactcattacaacacgagttgggatacagccaaatttgaagtgtgtcaccacaagtttgccgattactctgaatacacgaagggtgtttctattctcaacgactgtaaatatgggttctctactcatggtaatttgatgagactctcacttttgaggtcagcaaaggcgcctgatgctaatgctgatatgggtaaccatgaattctcatatgctatttatcctcatagaggccctctatcccacaagaccgtgaagttaggattagaattcaactatcactacaaatttgatttatcttctgaagccgctaaggcctttgaccaatttatcactctcggcggtgatcctaacgtggttttgtctaacattaagagaggtgaagatgacaagtctattgattctcaatatgctcttgacccacaagacaagacaactgttgtcgtgaggttgtatgaatccttgggtggtgaatctttagcaacattgactacttcactgcctattaaggaagtacacaagatcgacagcttggaaacaaaaagtctcgagaagttgcacttccatactaataaaaatgatgctaaattgcaggatattccaattactttgagaccattcgagattggtacttataagctggttctttgaatgtttaagaagtaagaagtcgggtatgattaaggaaacaagggcaaggttaacgaaatttaaaagttggaagacaatataaaaagaagaaaatggatcgaatatatatttttatattgcccttatggtatagatttattaagtagctagctggtctaagttggtttatgtttgctattagtgtcatcttatttaaatattcgtgagcccggagctgtgatcacatgaaagtgttgaagatagttatgctcgtgttcaatgtttagagttggctaaactttaaagtcaacagagaaccagaacacaatgtcaagggaatagataatcagatattggtgagttgctggacatgtccactagccttgagtctactaaacatgtcaagtttctgaaaagacatttgctcatgttgccgtcttctcagcagtcgcacgatgtgaatagaatagccattatcttttattccattgtgggattgtcagcgttaggtgtagattgttctcgagagtatgcatctagtatcccttatatatatcaacactacgtcaaattgcaaattcccggctacgaagaggtattttcagggtttgtcggtagcttggctacaaatgtgtcaaatacatcctgtataagtttgcccaatactttattcgcccttcttaccttaaggataatgaaatgcgatgagttctttcaaaaaactgtggatagagaaagcttagggaattttattcgaaaatgtcagtacccagatggatccttcgcatctgtccttgatatgaataaacctacgccatcacctgtggattcgactgatttaaggttttgttacattgccgcggctatattgaggctgcttgggtgtgagactaaagaggactttgaagaatttatagatgtcgatagagtaattgactacatgatgaccaaaaaatgtgattttggaggttttggtgattatggggagactcatgctggttatacatcgtgtgcattgtgtgcatttcaactattgcatggtctcgataaattagattccgaatttaaagaaagaaccgtagattggttgctacatcgtcaagtttctaacagcggtactgtgcttttacaagagggtaaaaatccttattacgatcctgaagaaaatggcggattccaaggtagagaaaataaatttgcagatacctgctatgcattttggtgtttgaattcactcaagattttagatgaaaatgaatttaataatgtttgtcgagctggtttggctcaagattatctcttaacaaagacacaaaataatttaattggaggatttagtaaaaatgatgaagatgatccagatttatatcacacttgcctggggatagctgtattacaattaatgaatgggacctttgacggaatattttgtatccccaaacaatttgctccgtaattattaaatgattaagtcaggttcgctcttctgatttttgtttttgtcttctttcttctattttattttgttcctcgatcatatttacatggattcttttttttttctgatgcctattactcaaaatctcatgctacaaggctagttcataagtcgtagtcgttacataaatctttttatcagttcctcataaataccccatgcaatcccagcactcaatgcctttctagttagtctcatgcttaatccactaaataattttataggactttcttgcctaacgattatggttaaagtcgtaaaaaaactagtgaattttttgggttctaattgcatcctagtctttatggtgtcgaatggtgctgttatggaagtagctaaacttgctgagaaaattgcacttaatgcattaactgtcgctgaagttgttgatgtaaatttgccattatgttcgtgagctatcacttcacgcggtagtattagaggcactattaattttgctttctcatagagtaaaacgtataggccagaataaggtacatctcttaaacttgttgggccaaatccacggaaaaaccccttgataccataagttctatagacatctcttgtagcttcgcttatgcttgaatagttgtacaatgtcgattcatatctcacttttaaaacggtaaatggcatcgtaaggtaaccgacaatacctctagccagtgccccagcaattaggttctcgtaggtggtcaattgaggcaaattgctactgctggggcctgcagcagacgatcctctgtctttggccaacgcagttctcatcagattcaaacatgaaaggtaaagtgcacttccggtggaagttctcactgctgaggttatggtacctctccagagattcaatgggttgtcaatctgttttaacactgtaaaaagggtagcattcttgttttgttgaattctagtctttaaaaggtctaagggctgaagtgtaacagccgatgaaagacctccaaaaaaaccacctaacaaatgagcagatgtagtagctgatttctcagacatataactgtttataaaatccttctatgtgggtaattgctttagggattcttgctcaactcgataaagttattcgtcatatcatatcaaacctgacttttttactttcgaagcaccgaactctttttcatcaccaaatctgataaggatagatgaagagaaaaattgtttacaatggacgatagaaaagcttatagttagaattgacaattttcttgtaaactacgagtgctgtttcatgggtctattaagtttcagcgccatcaacgagtttttcggagttgctttagcacatcttgtaatgtcaaatggtgtaaatgaggattttgatccaggtcataactggattcatgacaaactgttaccacttcattaggcgttatccaatgagaataaaaccatatttccttcccgccgattctcctccttagggtattgtcactatcaaataagttaagtttcccaaaatctatattgcacaattcactgttgagccccagacctgtatacttggtatagcactcttttagagaccaaatataggcgaacatgggggctctcttggtaggattacactgaatcaagctctcgaattcttgtgatgagaatatttctttgaagttgtttaagtcttggtctccagagtaatcagccgtggatgccaggtctatgcctacttcgcagtgcttacctttgacaatatactgagccacataacgttctccattggacatgctaaacgctaacccgtctatatctttgagttgaggtttcccataggtcccatttttatactttaattgagtgtgaggtaatccagtagccattgaaatacctgaaatttgtaggagtcgattgcagagcgctttgcatctatctggatatgatttttttcttagaattcgagcctgctgttctaagctcaaaaacctcattgactcttcaaatacaaatgcatcttgtaaaccttcatggcaggaatctagtagaagtatactatgccaatttccagcacgatctaagtttcggattgactcctgcatgtctccataactcataatctggtttttcatcaatagctaaaatgggaaagatgatttcggatatcagtagtcaaagttttaacgactttgtaaatagaaaggtcgatatataaaggaaggcagcccggtttatctcgaattcgtcatgagtactggggttcaagatgataggaaacctttatttgattcagcagtatcctttctgagcgaccccagcgttaaggatgcacctttgactaaaaagattgaatttctgcagtctaaaggactgactcaacaggaagtagaattggccctcaaaaagtcacaacaagatcatgaaatgctctcgcagaatgttaataatagtagtactgctactgtcgcaagagaaccagatagaggttctctaatgtatgaggcggttccaccaccattgccacgccgtgattggaaggattactttattatggcaacagccacagcaggtttgttctacggcgtctatgaagtaacaaagaggtatgtaatccccaatattctaccagaagcacaatctaaattggaacaggacaagaaagaaatacaagatcaattcgaaagggtcgataagctgctagtaacgttggaaaatgaacaatcagaatttaaaaagcaagaggaacaaaaattagtggaattggacaagactgtagtagatctgcaaacctgtttggaacagacttcatatacaagagataagatcgaagatgaattcaaaataatgaaattggaaatggctaatttacagagtaaattggacacatttgtgatggctaaaagaggtgatcaacagttggaaaacattagttcagaacttgaatctctcaagaatttgatcaagacgcgtgagatgcatcctgggaattccaccagcagtactaatgacgctgttaaccacaaatctccgttgaacaaaaatcctgtaccgggtgtagaggcaattccctccgcaacagagatcctaagcaaaatgaattttggaaataataataataataataaggaccaagaacaagcatctgtaccagcgtggaaaaaggcaagagaagaatctttgaaccattcaaattcaaatccaaattcgaattcaatcccggaatggcagaagagtgcgatgaacaacactacaaaccctgagttgcatgactctactagcaacaacagtgaatcaacggcccaagaataattagctggatgctagtaaatatttaaaatataatattttatatactataggtttatagtcatcactatgtacgagctggtctctggggactatggaagcttgtaataacaatggtattgagatgaaccgttaaaattatgataataagtcaagtttcaagaccaccagtagcaaattgagctctgtttggcatttatagagtaattttgtggggccatggagaatgagaatttctacaagctggcattgagatgtgcagatcgtcagattgcctctggagatttccttaatttctacaaagagttctataatgagaaattctctgctaaaatggaaaatgaagatacgcctaacgaatccaaggtactagaagtatctaatttgctggcatccgaatgcataagacttctttccttcgagaaatcattaattttagccaattatgtggtggaaatggtatttgtaaattacaattcagatctggtacatgcatttctaccgcagttgtattatattactaatagtaacatgctaatccatttctttgctcaatcaagtgcatttttttccaaattatccgataaattagttatggatcaactgaacaaagatctttccacttacgtgattcccagcatcttgaatgtggatgtaactactattggtaatgatttggtggtggccatctgtaaatttctattattgatgatgaattttattaatggcaatgttgttctatcatcagataggtcgagagataatttgaatgcactcttaaatcgattatcgaaagtgaataaattgttacacaagaaggttcaacaacaagcagacgctaaattgatattcaaaaatgcaaaaaataatgtttttcctctagagtcagccgttcaagagtttgtcagttcaccttctatcacatcaccgcagtttgagccaagtccaatcagtaatgccaaggcacaggcatccggtggagccactgtatcaggagctaaatatcaagatattaaattggtgcgttattacaaaaacatttggctcaataataaaattatcaattggggacccatcgattcagatttcttatcacgttacgcttccatagcaacttctgcattccaaggtgttacttattctcctcaatctactgattccattttacaagatttgatagaaacctcgtttacttgtttcgcccaattcgttaataacaaacagtatcatcagctaaattccaattttaatcttttggaaagacaatggatggttttcatctgtaaacatctgcctcttttaatcttggaaaatggttctggtaattcccacacagtaccacaagcattggaaagtatcgatgataaagtggtgaaagcaattagaacctattattctgaaaaagatgatatgaaaggacgtaatgaggatttatttgatgactacccctctaacaatttggatataagacatgaattcattaaaaatttagtgtcccttggtttacaatcgcctactttactcaatgattatttgagagaggatcaaatgatagatactagaacccttctgactactgacgatcttattgtaacaaattcacaaggtgtacaagagttggttaaagactttaaacatttccttacgaattcattagattctttagaacctgaagtactcattaatgattccaatgataatgccgatggattacaacaaatattccacaattttgaaaatataccgcccacgaagcagagggaaatttctaatattctcattgatattttgcaacatgcgttggaaaatttagaattcgatcgaatagccaaaatttgcagcgtattatccttcaatttttcccattcattgaccactatactctcattttcatcaccaacaaaaatatgtgaaatgttgataaaatttgtagatgtatcatgggataaattcgtagaaccacgctgtaaggagctagtggaatctgaatatgatacgatgaacttttttctgtcatttagctgttctatactacttttgatcgtcatttggcagacatatgatttttcactggtagacgttgtattacaatcatctgaatcgaataccgaaaattcgtttgtcatttcttacatttctaaattaccggaaattccagatgtattccttttggacccaaagaattctctagatcaagaaatgaggactaaatcacaccaagtggtacaaaattggttaagagatttgtttgtaaatggttccatttctgacgacttgcttcaaagtgtcgacctgaaacaactagcagtgctagttccatttatctttaaacaggtattactcaccttagaggtcggagccattgaagatgtgtctaatttagtgggtgggttggaatattttcttcaacccttcatgttgattggtttggtaaagattgtttattggttagaacaatacctgtactctttgaaaagcgaaaacttagatgaaggccttttagagaagttacttactttattgaattccatttttaatccacaagcattgaatgaagattcaaaattatttcattcatctcttctccgtttgaatgctgttaggctcctaagagtgcttcgtcaattccgttcacaatcgcaatctaattacggtatttattcaaccgaatcaagtggtcacccaaaattggagcttttgatagaaagattactatcagcgctcaatgtatcaccaacatacaatcttgatccacgagtgataacaaccgaaaacatttattcacaaaagcaagttggctatggaaggttcttaattctcaatgaaaaccctattaacaaaataatgacaaaccaaatcaattctttttggaatcttcatagtagcacctattacaatttggactatttgaaggaagttattaatcttgtttcacctagagtctttctgcaagatgttcttgcaacgcttgaatataagttggacacatatggggtagcgggaactcgcaataaaattgccgctgtggaatccgagcatgtgatggattatctcttttactttttggtgctgtacgatgttagatcccaagtagacgcagtcagtctattgcaagtgatggatggtaattctgaatcaccaatagttaaagaggaaatgcagatgaaaacgactgaagtggctcccaaagcagaagtatctcaagatgatgattttgacatgctcttcggtgaaccagaaacaaatgttacaggagtagataaagaaaaccaatccacaaatgttgagtcgaagcctacagaatcgaaatacaatttgactgctactcttgagcgtcattcgtttggattaataattcatgaaatgaaacaagaatgtaatgaagctttatccactggggatatttcaaaagatgtttgtgataaaattacaaaatatcatgaaaagtacgtctatctattgaaaacctgtgttttctaatgggttatcattacgaatatgtgtatcaataatgaatagatgaataaaaataaatagaataaaacaaactaaacgatgctaaaatgtgagtctgtgcctaagtattagtatattacagtatttaccttctttgaagttggaatgcttcttattttttattttttatttttcgaattaatgattaagtgatgagcttcatgatgcaattttctatttgaatgtaactgtttccttattatcttcgccctctattctcttcacctttttagcttgagtcttaccttccatgacaacttgttgaacgtgttccttctgtttggctctatctctcattctttcctcgatagtatcacgaacaagtaatctgtagacagtgacttgtctcgtttgacccagtctatgagctctatccattgcttgagaatcaatggttggattccagtcagaatcgtaaaagatcacagtgtccgcggccgttagattaataccaagaccaccagctctggtactcaaaaggaagacgaatagatctggaacagtttgccagtcatgaaccaaatcacgacgatcttctaatttagaagaaccatcgagacgaatgtgtttgtattgtctgtaagtcagatattcttccattaaatccatcatcttcgtcatttggaaataaatcaatactctatggccgttgcgtttcaaatcaacaagtaactcatctaattttctcaatttagcagattcagtgataaatctatccatagagggcatagaaattggagatgaaaagtatttgttgaaagcggctggaaatttaccggtaatcgggaagtggtctacaggaatcttcttttccaccttcaagttatattgagtctccggtggaatttctgacagtgcttgtgaaatggtagggttaaataattcctgtcctcttctctcatagagatgacggcaaccaagaacgtcaatagatattggcgtagaagcagctccggggcggtagccagggtgcatacaattgaaatattggtcatcgtagattttattttgaatgtccactaatgaactcaacacaccatctgtggtagttcttgatagagcaagcaacctttcaggcttatcatatacatgtagaccgctcttaaagttctttggagcacagttaccatcatcgtagatttcttggatcaaaggtttgttcgaatcttccttattaaattcgagtgccctctgaacaatatctttacttgcaatttctgagaattcattgggttttaaacccgtgagtaatctcaaatgttcgataagatctctgtttttaactggatcaaggacgttcatggtaacgttcaaaagctttttacgtgctgcaatatcgttttggaaacttggtagaaccacatcttcgtaaattaagcggggcatttgataagtaattggattctttgttgaatacatgacttcactaataccgccttctcttgccattgaagctattttaccgaaatccacaaatccaaatggtgatgatacatctgctctttcgaaaagatctggatgattacaaactttccggaattgcatgacggtgttgattaaattctgatccgatgaagcatcatccgaaccagcggcattttcaatagcatcgtaattagttgatatttgggattttagaatttggtaaagtttagcttgtctatgggttaaatcacacatgacatccacttcgatcttatcacccaattctgattgaacgttcttcttcacacgccttaacatgaaaggtttcaagatcatgtgtaaacgtcttaactgttgttggtttaaggttgtattggcctcggcatgagattcaatatctctagaaaaccattcattaaactcatcgtgagaatcgaacaacgaaggcatgatgaaatgtaacaatgcccacaattcctgcatgctattttgaattggagtacctgtcaaaagcaatctgttacgacagtggaaactcaaaagatttctccaacgtgaagattgtgaagacttaatagcttgagcctcatctaagatcatgtattgccatttcattttctgtaaataagtaacatctgaaacgaccatttgataagaagtaaccataacgtggaagggagaatctcttgtatatctgaaatttttcctatcccaaaatcttcttaaaactttacgatcattaccattcccccaataaggtaggatgttaaattcaggaacaaacttggaaatttcattaacccaattgtgtaaagtggaagcaggtgtgacgactaagaatggcccccaaatattatatttttctgccaaatgtgctaatacagaaatggattgaacggttttacccaaccccatttcgtctgctaatataccattgataccttgatcatacaagttagccagccagtttaaaccctttaactggtattcctttaaagtacatgctaacatttgtggttgttcgatggtaatttcacccaatgaagtagggttttggaaatttaattcttcaccattagatgaagaatcatcgaattcctttgtctttgctctagtttctgctaaagcgttggatgcattttgagcggctttgattcttagttgttcatcatcttcattatcgaaatcgatattatggaactcagtcttattggcttcagtagcgtctaagtcaacatgaccatgttggaaatgttgatgcagttgttgttgctgttgctgctgttgctgctgttgtagctgctggtcagccattgcaccttccaattcattggttttaattttacgaccgatgaaatgtgagtacaattctgtttgggttaaaaggaaatttaatttctttgcttgtctcttattttccctagcttcatcctcctttctggccgattctaatgcttccttttcagctttcttcttcaaatcacgttcttcacgttcgttcttcttccaaaatgatgacatttctctgatacctcttctagctcttgtttggaaatctttgacttgtttgaaatttctaaattgccattttcttgcttctctggcacataatgaggaagtctttttaaaattagcagttctaatcgattgaatttgttgaactaatcttgccatctttgcacaatccttacgagccatatctttccaaatggtgaagaaagtattgtcgtagtgacgttgaattgctcttgcctcctttacagtcatctttaatccataagttggtaatccattctttgttggtgatgcagtcgcagaatcaatttcattggcaggtgtaacgtcttgtgatccatccttagctgtaatttttctctttttgctactaggtgatccagttggctcctttgccttattcttagctgcttcctctttggccttggcggcttctgcaactgctgcagctcttttagcttcatttatatgcctttttagccttctcacgtgatactgttttaatgtaactttgactgatagtttcgaatccaatggattgtaatcggtaacaattgcattggtaaatcttctcttcttgactttgacaaccttgttcttgttgcacattttaaccagttctttaacgatttttgatctatcgctatccaacgtaacagttttatcctttctcgacgacggccttggtctgtcgtcgtctaacaagaaatctttatcgttttcatcgtcctccaatgaaaattgaacatcatgagaatcctcctcttgctctggttcttgcgtttcttcctctgcttcatctgcttctgcacctccagccgccggcatatctgtgcccacatcgtcaccaaccgagtctggctcttgatcttgatcctgctcttgatcttgatcgccatcttcttcattaccgccatcttcttccacttcctcatgtgttttgccattgacaagcggcgatggttgttgcgatccatccggctcctcttgtttaacttcatatttctcttcaaccggctgttgcaaatgctcaaccgtatcaccgccattctctaccacttgatcatcctcatccacctcctggatctttctcttccttggagctctttttggcttttttggcttctcatcctctacaacatcgtccatttcaccaagtagtttcaacttgttttccttgtacttggcatatgtatcccattcagctttcgtagttgccatatctttgtacaaggaatccaaagcagcccctttccaatctttggattggttattccactctgacacaagctcaaattcctggtaattgataaatttccagtcttgatactcatgctcaagggcatctctttggctaacgactgaaaaatctcgattcaatccctgtaagtatttttgtactggatccataattccgttaccatttacaattgcagtatttctactactttcatcacctgtcaccggtgatactacgggtgctggtggtgttgacgtaggtgttggtatctgttcaccttcttctttgttaagcagcgctgccaacgacattggctttacgagtctctctaggatcctacttattaatacgctatagatctagtttataggagaagtgaagtaaagttgtcttagtttataccacaagacgtttagtgcctccatgttcacccatgggacggccaatcacacatctaacggtcgcccgtaaaagaaaaaagacttgggaaagggcaaacaattttaattgttgttgtattgtgatcaagtaaagttgtctggtgacagttatttaggcaagtagatagaaatggttatgatactgtctccatagagagacagctcttgtgattcttgtactctatatatgtactactatacttataatatgccaaagttttcacctcttgaagatctttctgcaccaaaaagccaagtgttcggatttgtttcgcaagcgtttctcaaacccagtttgttctcaaatgcctaaatgtgaattggaattcgcggcggccaacggagcgaaaaggaagatcgagaaaaattggaagggatggaagaaaaaggagttggaaagtgtgcatacaaggaagaggttcggcgggattgtacactacagtaaactatgagtggtaagaaacacatctgtggtggaaactatgtgatttggacacgttttgggtatatgatctgtaatcatgtgactcgtatagtgtgatggcggctatttctagttcacgtgatggtgtacgggtgcgatttacagctcgaaaatgaaaaattcgagtcatcaccgctgtaaagaagaggaagaataagccaacagtaacttatctggaacaatagcacaagagaagagtagtagatccctgcctcagcatgtcgacatttggtcatattttccgtgtaaccacctatggtgaatctcactgtaggtccgtgggatgtatagttgacggtgtgcctcctggtatgtcccttaccgacaaagatattcaacctcagctatcaagaagaagacctggtcaatcaaaattgtcaacacctagaaatgagaaggacaaggttgaaatccaagcaggtattgaatttaataagactttgggtacacctattgcgatgttaattagaaatgaagatcaaaggcctcatgattactcagacatggataactatccaagaccatctcatgctgattatacgtacatggagaaatatggtctcaaggcatcatcaggtggtggtcgtgcgtctgcaagagaaactattggtcgtgttgcagcaggtgctattgctgagaagtttttatcacaggtttccaacgttgagatcgttggatttgtttcacagattggatctgttaaaatgaaccgtgatacttttgatccacatttccaccacttgctcaacaccatcactagagaaaaagtggattctgcaggttttatcagatgtcctgatgcggctatcgcagctgaaatggttaaagaaattgaaaaatatagaggtcaaaaggattctatcggtggtgttgttacttgtgtgattagaaatttacctgctggtattggtgaaccttgtttcgataaagtggaagcattgttagcacatgcaatgttatcaattcctgcatctaaaggttttgaaattggttctggtttttcaggtgtttccaagccaggttctcaacataacgatttatttgtgttcgatgaggagactcaaaaactaagaacaaagactaacaactccggtggtgtccaagggggtattaccaacggtgaaaacgtctatttctctgtggcgttcaagtctgtggctactatcgctcaagaacaagagactgctacttatgatggtaaagctggtgtcttagctgccaagggtagacatgatcctgcagtgaccccaagagctatcccaattgtagaatctatggcagctttagtgctagcagattccttgttgatccaaaaatccagagattttgcaagaagtgtaactcattaagtattctttgttttatttaggctcctgtaacacagtctacaaatacgtaagagcaatagtactccctttcaatagaacttcatcacttagcctatcccttgatcgtgataattgcattattattattatttttctgttccttcctttttcaatcaacattttgccaagcgaatctttttcggctttaccctaatgaactattccaaatggctgggttaaacagatcaatgtacataatgtttgccagcgaaacttaactagtttgttacaatcattaatggtaattggcgttaaattcctggttttcgtcctcagggttctctaaaattagacgtaggtatatatatatttgcaaagccgtcaagaggttcgagcaggttgagaatatagaaaaaagtctcaagatatttgattgagcgcttcgtgtggtgctggagagaaactgaagtcctagcattaggttatcgggaaccttttactctcgttttccttgcattacttattttaatttgattcgatttcatctcatttggaatctaattctgaatattgatactctacgtgaaattgcattaattcaagtactttggtctttatgtcagttagcatacaagtaccacctcttccgttcaaagttaaggcgagatatggttggtcaggacaaactaaaggtgatttggggtttcttgaaggtgatgtgatggaggtgacaagaatcactggtgattggttttatggtcgtctacttagaaataagaaatgctctggttatttccccaataacttcgtgaatattctccaggagcgtttaaataggaatcaagaagctaaaaagaaggaagtcatgtcacaaccaccaccaccaccaccacaagaaagtagtaggaaagttggaattccaccaatcccagcaagaagtacagaagaagggtcgccgagatcttcacggtcttcgagatcttcaaaatcgtcagatgggtccctgagagctatagcaaagagacaacaacaacaacaagaagctgccaacgtgagacatttaaggtcaagaggttatcatgcgtattcatcgccaactcttccaacggtatcacctagtggacatgaggcactgtctgcaaagatgtatagaatcccagaatctacatcgaggcgatatgaaggggaatcagatttcttaccagaacttccaccaattccaatttcgccacgaactgatcttcatcgccgtccgaaactgccgccaagcttaaaatctaaatcggcggcagatttatatgcagttggaacctcaaaagattcatttgactattttcaagagcataaaaatttctacgatggatatcatccatcgagttcatcctcgtttaccaatgacacaacttcaatggatcttttctcggatgctcaatacttggaaaattcggctctgagtagtgaaaatagttatgccattatgagtgatttcagtgctactagtgctggtagttttgctagacataaatttgctcaatcctttgaagactctctagaaagatctcaaaatgctactggtagcggttctctaaatgattccggtaacggcaagatgggaggtgtgcttcgaagaatggttaaaaagggtagtggttcaccagtaagtgatgttccaggaagtccggtttcaggtgaatatccaaaactgccagatctcaagtcattagtagtcaattcaacgagatcagatgctcgtgattggctcaccgttaagactcatctgaacagatcaaggtccctaaccaaacatgaaaagcatccaaggtacatgcgagcccttgaaatgcatagagatttggtattacatccgcaagatgcaatttacaatggcttaaatacgaatgaagttaaggcacatggtcaaccggggattgtagatatcgaattagctggcctcaatttggaatatatcgataatatgacaaggaaaagatgcataaaggatggatcaatgaggctggacgattgggcgcagactactttttctgctaggtatgccactccagtggaaaaattaagaggcatatacgttttctgtacagagatgtttggattagtcgacgataacggttgtactgatttttcgaggcaaccatctcatttagatcgaattctttatcaaaagcattgtacgccttaccaattgacatgtctcttcaaaaggttatgcaactctctagggattacgtgtgaggttgtcattggatttttaaagacacccatttccaaaacacatgaatttaaatacaatcactgctggttgagagtgttagcaaacaaggaatggaggtttatcgatgtcattctggggaacgtttcaaacccagtgcatgaatttgttaataacaaaagaataacgagggcagagaataggtatttcttggtggaacctctagagttcatctatacacacgttcctgccaaagaatcggaacaacatattgttcccagcattgatcaattatcggcactatatctgcccttagtcttcccatctttctttagaaatgggttgaagctttacaaatttagtaccgcattagcatatttggaggattcggagatttatgaatgttctattgaaatccctagtgacattgaagtatttgcatcagtggttatccccgcagaaaattcgaaacttgctaaggcatctagaaagatggatttggcattgactcaagtgaaaagacatagagtggatagttcacgcagaatagccgtcgtaaaggccatcttaccgccgggcgtgaaggaaggtgccttgtacatccattctgggttaagaggatctcaaacaaccttagccaatgtccatccattgtccatgatggtgtcactacaacatgaaggtgaagagatgaaatatgaattcgtagttcgtagaccttccgaaaatgtacaaaaagtggaaatgtacgttgtggaacctcagaacaagtatttgtttgtcaataacgaatacagctttgaaataattcaacagccttttgatgggatattatacaacccttctggtatcaacaagaattgtaagcaaccgttggctctaaaatcaccctctggtaaaatttacgaattaaagaagaatgatcctcactttgcatttggaacttggaaattcaacgtcgttcttaaggaaacaggtgtttggacaggtttagttctagctgattctggtatgggctggtgcagtttcgctgaatggctctgtatttaaccgtctaatatgaaccagaacaataatcataataacaattattaaaaaaaaaaaaacgcatttacataatcaaggcatcgtaattaattaattattctgtattttaaaaatctaatagatggagtagtatgaattgtagactatagaatatagttcatgttattccgaagctcatcggtatactagtacttttgtacgaacacttttttggtgaagaaaataagatgggaagaaaaaaatggttaagtttactacgatatattgactagctaacctgttgagttgaccttcatcagatccattgaagtttgatcttaggcgcgatgggtatggaagttgatgaagatgacttgagagagtgctatatcaaatttggtgaggctctcaaggattttaagagcgtagaactcagttcaacgaatccaccagaccctttcaatatactgagagattttagatccatcgctggaagtgctgccttaaaatcattggaaaagaaagattcgaataaagaaggctctgattgggaattagaggcaaaattatggcatttattggagttattgggatcttacagaacctcagatataaatccagatgaaatgacgacgtattcctacaattctaatgcagtatttgagaagaaacttttacaagaagatagaaatttgtaccaaatatggataatcatagtttggatccaaaataatatgaaccctcgactgaccgaaagtctaccgacatccaaatggtccaacagtatcatatccggaggattgaaaagctgcgatttagactttcctctgcgtgatttggaagctgatattaatgtgaaggataagttagaggaccatgctttttataaatacgtttatcacttgttgttggctggtaaagtcgatagtgccatcgaagaatgcagactcacggaaaatctgacattgagtatgatattgtgtggtatgcaagaatatttggaccccgtaagggatacacagattcagaatgaatttgaaacacaacagggagtcaaaaaacatgcgctttggagacgtacagtgtatagtctctcgatggacagcaggctggatcaatacgaaagagccatttacagttttttggcggggactattcctcaagatgatgttataaatgattctaactgggattctgaccttttgttgcatttaaaccaaatcttacaaattgaaattgaaaattacctatttgcgaagggcaaactcacaactgatgaattaatcattccattaccatctaaaccacagggcttacaaaacgtactggatctagtttcttctaaacacgtagaggaaagtgaacatcccattagaatactaattggtgctgtcatactcgacaccctgtcactggtcttacattcttctgtggaaatgctcctagattttgttaaaggtggttcaacagataactacttggcagagaaaccgtaccttctgaggatagtcactcatattagccttttcctgagcatcctagagccacaggatgaagtatcctccaacgatagatccaaattgatcacggcatacattagtgtgttgaaattccatggactttatgatattatccccatctatgttaaatttttggatgagcaagctgctctagaagcttactcctttatcctatcgactctggaggaccacgaggtcagaagaaagcagttagaggtcgctaatttcctacagttacctactcctaacatactaagaagaacgactcaaaggatatttaatgaaaccgaaggagattataccccacagggagaaatcctggttactttcgatgtagaggccgttgatagacatttaatctctggtgtggaatggttgctcgagggaaaactttacgtcgaggctgtagaatcaatagtagcattatccagaagattcttaatcaatgggcgcatcaaggctttagaatatttcatggatcgcaatcaattgaatgatgtactcaaaagttatgaatttgcgaagatttcacaaagggattctgaacatgagaaagactatgccgttgcagagatattagaatatcaatacttggtggaaggtctgaagaaataccaagaatggcaaaagactgtaaaactaatggatttagaatcaaatgttccaacagtgatcgccaaattccaggaattttccaaatttacttacaagctgattaaaaactttttagtggatctttcagaagatgggtcgaatcctgacggcgacgtattctatgagatcagatctctttacactccatacttgatcatagaactgcacaagggtctagtagaggcatccaaactgctaaaaatttcaatgtttatcaaggaggcacttgaaattaccaatttggtcgctaatgaaaccgataaaatttacctactattccaaaccagtggtaagttggaagagtatctgcagctagtagcgtacactgctattctttccggttccgactataaataatatctatctgtactaatgttctaatatatatgttaccgtcatcacgtgatactgccgatcgacatgaaattttaagagatgagcatcatcgaggatctaaccacatacattggagaagaggtggctaaccggttagagcttttatttagttgatgagaggtcgttggggacttcttaggttcacatgcggggggttactgcgaaatttcaggagagaataccacggcaaaaggaattccttgaggatttttgaagataatcgatggttggttcaaaaacctagtttaacgagcataccacctcaagagagatcccaagtggatgctattggattcatgtttggtcgtaatgctcccgagaatatctacacatctgatgaaaatttcaaagagttgttggataaaagtatgcatcatgtatacaatcaaaagttaacagcgtcttttgcaggtcaagagaattacaaggactatgcctggttaaagcttcgagattatatttatggacagttgaaggatgggagtttacaagaaaaagtaaaacaatacaaacctagcttgactcaactcattaagccttcatgccccgcacatgtggttccccagttgattaaagtagatgactacgattctaatacctggcaaactattttgaagaataaagtcgactcgaaactgaataaatatgtgcactttctgtcacagacttacgattacatttacgaacaagaggtgctgccgctcatgatgaagacaaagaagaccgatgggtccgacgacgtggatatttcgaaccctgtggaatggtttgccgaagctagaaagatgaaaaggcatatcatcatgcacattgggccaacaaattcaggtaagacatatagggccttacagcaattgaaacacgccaaccgtggttactatgctggacctctaaggctcttggcaagggagatttatgatagatttcagaaggacggagttcgttgtaaccttttgacgggtgaagaagtgattcatgatttggacagtgcgggaaaccctgcagggttgacctcgggtacggtggagatggttcccttgactcaagatttcgacgtcgtagtgttagatgagatccaaatgatggcagatttggatagagggtgggcctggagtaatgctctgttaggtgccaaagctagagaagttcacgtttgtggggaaaagagtactctgccgctcataaagaacattatcaagatgactggagataagctgactgttaacgaatatgagagattgggtaagttgaaagtggaagattgggttttgcccaaaggttacaaaagtctgcgcaagggtgattgcgttgtggcattttccaagaagcggatcctggatttgaagcttcgcattgaaaaggatactaatttgaaggttgcggtcatttatggttccttaccgcccgagacaagaatccaacaggcacatcttttcaactccggtgagtacgacatcatggttgcctctgatgctattggtatggggctcaatctttcaatcgatagagttattttcactacggatgtcaaattcaatggtaaggaattggtagaactgagcagctctaacatcaaacagattggtggtagagcgggccgattcaaaagcggttcgcaaggtcaagatattcctcaagggttcattactacgtttgatcccagcgttctgtccactatcaggaggggtatggatgcccccattgattatttacagagcgctgtcatttggcccactgatgaaatatgcggtaacatcattacgaaattcccaccgggaacaccgcctagtgttctactgaaggctattgcgctgagactggagaagagttcacacaagcttttcaccatgtcggatctcaagaacaaactgaacgtactagcgatattcgaacacatggacgatatagcttttttcgataagctgagattgagcaatgcgcctgtcaaggatttgccgctggtgaggaacgcgtttgctcaattctgcgataccattgccaagagacagacgagaggactattatcgtatccgttcccatttgaagtgttagactacaaatgcataactgatgaaaaattcggcctagagctttacgagtcgctatacaacattattatgctgtacttctggttgggaaatcgatacccaagttatttcatcgattacgagtctgctactgatctcaagtatttctgtgagctaatcatatttgagaaactcgacagattgaaaaagaatccctacaacaagggagctccccaatcagtagggtccatctacaaacagagagctcactttgtgaaccagtacacaaggaaaaggaactgataaaacttgtaaatattaatggtatatgtatatatatatatatatatatacgcctatagtaagatcttcatagggcgcgactcagaaggtaattgcatctcgtggtacttttcaacatttttttgacatgtcaaaataccactacacgaaaaatcatatatataaagattccttatacgatggcactagttggtaaagtaattgctactcgaaactcaagaacttactatcttcctcaacccccatagatcaatcatcatgtctgataacgtctatgtcgttgcttcctgcagaacccctgttggttccttccagggatcattggcttccaagaccgccattgaattgggtactgccgctgtgaaaggcgcaatctctaaagttccacaattgaaaccagagaccgattacgatgaaattatcttcggtaatgtcttatccgccaactccggacaagcccctgctagacaggtggctctaggtgcaggcctgcataaccacatcgtggacacaactgttaacaaagtatgtgcttctgctctaaggagtattatcctcggagctcagagtatcaaatgtgggacttccgacgtcgtcgtcgcaggtggttgtgaatctatgaccaacacaccatactacatgccagcagcacgttccggtgctcgctttggtgaaactaaactagtcgacggtattcaaagagacggtcttaacgacgcctacgacggtcttgccatgggtgtccacgcggagaaatgcgctagggactgggactgcagccgtcaagaccaggacgaatttgccatttcctcctatcaaaaggcccaaaaggctcagaatgaaggcaaatttgacaaggaaatcgtgcctatcactatcaagggtttcagaggtaagcctgacacgcaggtgactaaggatgaagaaccaagtaaattaaacgtggaaaaattgaaatccgcaagaaccgttttccaaaaggaaaatggtaccgtgacagcaccaaacgcatctcctttgaacgacggtgccgctgctgttattcttgtgtctgagaagaaattgaagcaattgggtttgaagccaatcgccgtgattagaggatggggtgaagctgctcacgaacctgcagatttcacgtgggctccttcattggccgttccaaaggcattgacccacgctggtatcaaggacatcggccagattgacttctttgaattcaacgaggcgttctcagtggttggattggccaacaccaagatcttaaagatcgatccttccaaggttaacgtttacggtggtgccgtcgcgctaggacatccattgggttgctccggtgctcgtatcgttgtgactcttttgtcagtgctagaacaagagaacggtaagctaggtgcagccgctatctgcaatggtggtggtggtgcttcatctatcgttttagaaaaattgtagcttaagatgtaattggaaagaatcaactgccttgctgtttttagtatcgtgtattttattttgtcttgttctgtctgagtcaacaactttagaaggtactacgtgtgcacattgacttaaacgactaacgtacactaaaatctggagtaaagtagatcaattgtgattcaagaatcgatcaatggctaacaaggtaattgttttggcgggcactgcaggcacaggcaagtcaactgttgcagacattctaatcaagaatcacagcgccaggtatccagatgtcagattcatcgagggagatacgctgcatccaccatcgaacgtggagaaaatgtcagcaggcatccccttggttgatgaagatcgttggggctggttagaaaaggttgccaatgtctccagcgagaccgccaaggagcatggattgtgtattgctgcatgttcgagtctcaagaagaaatacagggacttcatgagagaaaagagacctgacactattttttacttcgttttcctgtatggtaccaagcaagaagttttgggcaggttggagagacgttcccagcactttatgaaggctactatgatggaatctcaatttaaagatttagaattacctttggagggcgagccccactgttgtattgttcacatcgatggtaagagtttcgagcaggtggaggaagataccaaggaaaaagtctcaaaaatgtttgcagagtaactataagcaagattgtttgtttttccctctttgtatctccaagacataatataatgacattagcaaaattaaaactatttacatatcatactaatgaactgatttaactactatataagaaaagtacaaatcgtaacacgtgaaatttacaggaggagggggtacgttggaatcgtcatgacgcttgatcagttatagctaaaattcgttagagtcgacaggttattcccggcccattgcataaacagactgttaccaaaactcttagtccactcttcgtcggattcacaggggatgctttcactcagactctcatcgtctatttctatttctctttcctcttccttttcttccttcagcatctcccttaaacacatccctctgtcgcctgtgataaaagtatcgtaaaggtgatcatccaattttggcacactcttcaatggaccttcattagtaaggcttgtcaagttagccacttcattcattaaactcttgatatcaatccttgcgtatgggtttatctgcaacacctttattaatatttcgtaaacttcctctgaaattggcaaaatttgcttcaatacggatggattcttggcgtaatagttgaaagtggaatcctcggtctggtgagcctttaaccatggatttctaatgcagcacaaatttatcagtataactcctagggaccatacatcacctgttgatgtagggaagcttgttacagtatcattttctccactacagtataggatcctctctggtgccatatagtaagacgaaccgatgcaaacatttggagccagatattggcatgtagtcgatagaccaaagtcacacaaatggacattattattcgcatccagcagcacgttttcaggtttgatatcgcagtggaaaacaccgttatggtgacagtgctctaaggctgagcataattgcaagaaaacctttttaatcaagagaccgttgctagtaaaatgctctctgtcgacgatcgcagtgaacagatccaagtgatagtagtccataacgatgaatgttgctaatggggactccaacacctggtgaatggtgcatacgttttcatgcgagtgcactttcaaatgtaatgcgatttccttgtaatgaggagctctagccagttccgcattgcttaagctttgaatggaatctaaatccactgtgggcaagaacaacttgttttggaatgacttgaaaaagtggtacaactgggtctgcaaaacggtactcttcttaatgttatcatcagtcttgggcttaccgaagtcgttaagagaattagacttcactaccgctttaatggcatattcattttctgttattatatccagcgcatggaataccagcccgtacgctcctgaacctatctgtgaggttatctggaaattgtttatctgacagttcgttagcattatgcctgctgaatctagccggctaaaggaagagaatcccacatcatctccccgtattatttttttctgtactccacttgctttatattctacgctccttactcatcaacccacttttctcacgcaaaacttatgatttcgcttggtggtaacaccacgggtgtacatcagcccagttaactttcagaatggtgtcagggtgacataggatgcgatgaactagttgggaaagatcattccagattaattcaatcatgcaaaaatttcattcatttactcatcatgcataccagtttggactgtcggtggaataacaccggcgcggtttaaacagttctcattccttttttctatagttcttatgcaatgaaggacatgagtttaatcggcttgttggctttttccttcttttctttttggttctggagctccagtccccggagtttgatgcactgatgctggtagtgggtaaattctcctgtggtgtgcaggacaaaaaagcgttgctccgtgtaaacgactagtagaaatgtgtccgttggcttgtagataaaaaggaacaacggaagtcatctcttctttttttttttttttttttttttttttttctttctttctttctttcttgttgggttgaagaagtttgctctgtcagcgccagcctacaacaacacccttattaccgttatttttgtcattgttgtttatttagacagcagcaattctcgcatgtgcacctgtacttcttaattcagcaccacactttctggtggtagtggctatttccgtgtaatctttccctcttcttgatattcttgtttgcctacctttcggtgtatgttgtagaagtacaactaagtttccaagtttatattcctttatttacgcgcccacgcgttgtgatacgtcacctcggcggctaaagatggtataaaaagagacaaagagaccgaaaccctggtctaaaccaaattatctaccatttgcttaactttcttgtcaaatagagtagattttataggcatttctagcgaatagaaaggatctttcatcacgtagtcgctgtaaagacagtagatttttcttaaaaagttgtctgcgacatgaatgttaaaaatattattactgctgctgggatttgctggcgaaagtgtaccttgtgagcatgctacaacgaatttgagcccggtcatggtttggtatatgtacattgtgaattgatcggtacagagctgtctaacaccagaacgattccaactttgaaacgattccttaaagaagtcatcacctttgaaactgcctagcttaccctgtggggcagaagcaccgtatttactcctttcactgctagtacgacctcggggcattccgacatacgggatatatggtacggtgtaatcgatattttttgatgaggactgtgatagttgcagtgcctttggtgttaactgcgtggcaatggcgaaggatccgtgcaatatactcgctagaataaggtagtcgttgctgttcagccctttgtccacgtcgccttcaaaggagcgatggtatatgagaccaccggatttgttaatgacgagtaacattcgaacagccatgaaggggagctggcaagtgtagaaaaggtgtctttcggtgaatactctgttacttctacttgatatgtgtacgaagtagatgtttgtaccgacgcgatgtccaaggcacacacacactcacaaacacacacatacaacttatccttcattttagacgaatcaacaatgtcaacgattatatttcaagatatctcacaagtaccgtcaccgttgcagatcaatgatagatccacactcactggtagagatctggctattttagaagcattcgaaaacgaaccatggaattcagggccaccaccactagtggatcagaaacttagtaggctcgatagagatctacttttccaaatactcatggtggaaaacactagtaagtcgaaattgaatcaagtggatgatatcagggcaaaattggacccaactttacaaagggttgatcggctaaagaccacccgggatagggttgtcataaaccaagtggatattgacagtgatgaaccaacatcggaaaatgcaagtacgaatgcgcttaaccaatccagggcagtcttcagattagttttacaagataggaaaggctcgcttttttatgcaataaattcgagcccattgtcttggctacaagtttgcatgttagggtcaaaggtaatcataaagaagggatcaatcttcaacagaggtgtgtttatcctacaagaaccgaacgtgttgtttttaggtggaataaatagagcttggaatgagaatagagatggaaaactctgtgagtatctcgaagctaaactgcaaagagatgctgaggatatgaaacttaatggcagtaagaaaagaaagaatacgcgataatattggttgttgttgttgttttttttatttatcattattattatttcctacaaattgatgcatgcttaaaggatatattaattttaggacagtatgatttcccatagctcgtctgggttgatgtaatcatgatggacaatcgatatcaggcaatattcctggtgaatctgtctcaaaagactgttcgttgatgtatttctggggaaaagtttagcccactccaaccatatgctaaaggcttcatcactccacgctttaaaggattcttcagatacgattgttgattgaatcacttgactatccgagaagacaccccaagtgactacattcgaactattggactctagattagtttcaaaatttccctgactgtcatttgcataataagtcaatttagcacgtccgtactgttcaattgcttttttcatattaccgttttcccatatatttttggggacaaacatttctatgaatgccttttggtaaaccacaccgtatgccggaccccaaccgaatattttattggtactaggtgatccattggtagcaggctgggatgccaacgttagaaatcctctctcatttaactgaatcaattcttcttgaattaaagctgtttccggtgaaaggcctaaatcacaccatggcaatgcgtctatagatccttccaagtatttgatgaaaattatctgtaaatcctgaatagtttttggttgaccccaaagttcgtaagccttcttgttacttactttcaaagtgggaccataaccatcaatttcaccgaatgcaggtgatcttgtatcaccgaaacgaccgttggggaattcatcccacgtagcatcacgtcccaacgtacctgaaccttgagagatcgaaatgaccacttttctagtgggggcacctacaccatgttggtttttcttaccgataataactctattagaagtcagttcactggaaacgttgctaacggtacttgattgtcttcttcttttacgattatcctcgatcaagtttttcacgttagcatcttcgagaacaatatcgccttcctgatcttgttcttccggttctgatgtggcagcctcatcattttcatcttcaacaacatccaaagtatcgcttaaggtaggggaggttgccactatcttagcaacagctttctccaagttcagagtgtagaaatggaaacatttaatgcgaccatgagtagccttgtaaatcgtttcaataatttctatcaaaatatccacaccaatagatttaactgcatcatcgtcagcttgaatctcaggtgggaatttttgtaaaacacttgatggtatagatgcatgagaaagtttagcggctctgttgaacaaaaggtaagaattgatgggcataagacctggaattaggggcaaatctgtagagatgtgctgcctaaacatctgttcgaattgtaagaatttatccacatcgtaaaacagttgagtaatgacaaaatcagcacctgcatctattttttcctttaagaatggtaaatccttccaaggattttgctcattaccctcggcttcaccttcgcaatggccctctgggtatgcagctacaccaatacagaactcgtttggaaatctgtagttaatgtacctgacaagatcgacagcatgcttaaattccgactgagaagcttctaaatcagaccaatcttgaccgatgggtggatctcctcttaatgccagaatattatgaattcctgcggctttacatctagtcaaagcatcatcaataatgtttctatccatattggtgcatgttaggtgcatacaaattggcagattcaaattcttttgagctaaggaagctaattctaacgtcttttcagcagtgctaccaccagctccccaagtaacggtagcaaacagcggtcccagtgcagtcatacgttccatacgttctaacaggttctgcttaccagtctctgtcttgggtgggaaaaactctaacgagagtgtgggaccatctttggattcataaagttctctaattgacattctcaatgatctagcagcaacaagcttctttaatgatcaaatgtttgtgtcacttgccttttcaaagtagttgtgtgttggtgaatttttgacgtttttccttaatatctgggattgatatcaataatccaagccatagtataatgactcgagaaaacaagatcaagtgaaacaaaaatttggtatcgaaagctatttggttctttgggatgaattgaaatgcctcagttgtttatacatgaagattctgatgatgaacagttgcagttggagctttccaggcaggcagaagaggctgtagagttgaacaaagcacccgaccaggatcaaccagaggagagccctagtttggagaagacacctagcttggagaagacacctgctgaaccttcacaaccattgtatcctttgattccagaggagaatttggatgataatgggttaaagcccaatctagatgatatcagacaagttgatattcagttgaatctaccgttgaccttccagcaacaagttgttgaaaatacactagttactgacgatccattggtgattttggggaaaggtattggaatcattagtatcgtagccaacttactatttacattagctacacccacaagaattaatggacaaccaaagaggtcgtttgtcattgtgatgaatgctagtccaggtgataacctacggataagtgaagagttacaagaattatcgtggttatcaagctgtagtgaggatattcaaggtgaagacaatgacatcgacgaggattcacagaggccattccatgttatcaatgcagaatctcaaaatgcagataaaagacaaaaattgtacaattccggtggaatattcagtgttacttcaaggattctcattgtcgatctactttcaggtttgttacatcctagtagaattactggtatagttgtcttgaacgtggagaaattgaaatcattctcaaatgaatcctttatcctggaaatttacagatcaaagaataaatgggggtttataaaagcattttcagagtcaccagaatcgtttgtaacccaattctcaccactgatgaggaagcttaaggaattaagattgaaaaatgtgactctttggcctagatttagagtagaaatttctcaatgcttaaacaatgcagttaatcctcagattaataaagttgtagaagttaaagtttcacagacgaattctatgtctcaaattcaatttggtcttatggaatgtttaaaaaagtgtattgcagagatgaacaggaaaaatccagagttggtgttagagacttggaatattgaaaatgcattggatccaacgtttgttaaatcaattgatgccgtaatggtaccgaattggcaccgcatatcttatgaatctaagcaattgattaaagatatcagatttttgaaaaatttactcaaattgttggttagtggagatgctgtagatttctatgaggagttacagttgagccttgacgctaacaaaccttcgatctccagaaaatatagtgaatcaccttggttaatggcagatgaatcacaaatggtcatatcgtatgccaagaaaagaatatacagcgacggtgaatatgttttagaagagatgcccaagtgggaacaattgattagtatcatggaagatatttcttatcaaagagcttataaggacgtttcaggccctacgttaatagtatgctctagttacacaactgcatcacaattggcaagagtgttgagtcaagccgataggaaagatggatttcgtagaagtatgcttcgcaaactacaactttataaagaacgacgtgaggagagtaagacattggttaaagaaattagagaaagggaaccagatgctatgcctgaacttaatgtgagtgccgcgtttgctaaggaacaagtaataacaagacgaagaagaacacgaggtgctgccgccatggctgctgtagagcgtttgaaaaatgcaggaacaggtgaagacattgaaagtgtaattgatgactataatattaaagaagaattagaacccgagggactgttagagatggcagataatgaagcgacagcgccaacgactgagtatgaggatgaagatgattttggagagaaacttttccatgatatgtctcataatgctattacgaaggaaatatgggaccaaagaacccaatatttccaatttgttcatcgtggtgatcaaataatcattgaaatattcgccaatattactgatgactcttatttgcaagagattatgccttctaacatcatcatgtatgaaccagacttgacttttatcagaagagtagaaatacatcgtgctattcatagggaaatgccacctaatgtttgtttcatgtattacagtaatagtgtagaggaacagggccatctggtatctattaggaaggaaaaagatgcattcacaaagttgattagagaaaattcaatgttatcccaccattttgaagcagatgaagatttatctcattacaagaatttggcagagaggaaagtcaaacttaataagttgaggagaattactacaagagtcgctggtggtcaagcggcacttgctgacttcactcaagatatagtcattgtcgatacgcgtgagttcaacgctgcattgccgggacttctttacaggtatggtgtgcgtgtagtaccatgcatgttgactgttggtgactatgttatcacgcctgatatttgcatagagagaaaatcgattgcggatttaattggatccatacaaaaccgtagattagtttctcaatgtaaaaaaatgaggagccattacaagtatccaaccttattaatcgagttcgaggaaggccaatcattttccttggagccctttagtgaaaggcgtaactataaaagcaaggaattatccactgtacatccaatctctaataaattatcccaagatgagattcagtcagaattggccaaattagtcatgaggtttcctggtttaaaaattatttggtcatcttcccctttacaaactgtaaatatgattttggaactaaagattggtagagaacaaccagatccaagtcaatcggtggcattaggtaccaggagaaagcaagaaaaatcagaaaagaaggcagcagccaaggagagcgatcaaaaaaaatatgcgagattgctgcgtatacctggaatttcgaaagtggaatattttaacattaggaagaaagttaaaagctatgaaaagctgaaatcgttatcatctcaagagcttcacgatttgttaggtgatgaagatttagttgataaactttgtcggtttttgcaggcagaaaaagacgatgaggaggatgaattagcagatagcgatatcgaatagaaaaaaatgtaatcaccaaagatttatatttatctctataaagtttgtaacgtaagatatcgttgaccgattgatggagattgtaaaaaaaaaaaaaaaaaaaagaaaaaaaaaaataatataataattaatcattacaggtgcatatcatcatttagcaccttctaccaaagttgctaatatctgattgtttaatttaccaaacagctcagcttgtctggagatttcagcatcagctagtggattggacaggagggcgaatatttgggtatctgtaggtagtaatccaggtatcgaggccaaagatctacaagtctgtagtttttctgtccctggagtaaaatctatactcttttgaatgagtaatctggttaattcgatgcatttacagctaataaaggcaaacattctttttaaatgaattaaatttttatcagtgtgaatgctaatgttacaaagcacttcactcaaccttcttaaattgaaaccaatattttcttcagagtttaaccaaactaggggcatatttttaatgtttttattagaatcctcagattctaagaagttgacaatgattaacattgatgttaaactttgtgaaattataggtcccacttcttctatcaaagttggtaaggtgtttagttgcatgaatggaatcacggaaactagcaacgagaaaacgttattgaacaacctatacttgtcgcctttgttgtaggcgttgattaaacgaagagcggtaatccaatctttactttcctcttcaatctcattatcaacaatttgaggtagtaagatatctttgaagaaacttctgttgggatatgccagtgaaaacaatttagataatacatccacaccaaatccgtagtacttacccaatttcaaaaggtactctggatatgacagatgatcagatccactatcaaattttttgggttccccaaagcttaaggcgagcattagtacgaaaaaacagtctaaatgactttcgacttcataaacatgggaaatattggttaaagtaatcactgtatccttcttaaaattgagaccctttctattactcgatactttgtcactttgaatgaaaactaaccacatcaaatctgtaataaatcttttcacaaatggatttttccccataatttttgaattcctttctgagaaagacgcatttcttaagatcatagaaattgtagaaatttgatcgtttagtaaaacttttggatcttctgcacctctggtgttcattttagtaaatggattatctatctcttccttcacacttttcaatgcctgtaaataagatggtgtgtgtaaattggttaaatcttgattaggtcttcttgatagtggttctggcaatggttcccaaacccgtggtcctttcaatggtactgaatccgtttcattatcatcttcattccaatccaatggtgtttgagctggtgtaataggtacttgttcaagatctgtaccagttagagaatcaactttaacgcgtgcttctaaaggttcagaattgccgtcattttccacattcaaatctttcacgtaattttcaaacactttattgaacctttcctcggttgtgctaaaaggagtatgaggagatgataagattgaatcaacatcatactcttcacaatagattgtatggaaaatgttataattaccttgggctaaatttgccagcagatttatacccagtgtgcaaagagaatctaataaatcgggatatctttcgaacggtaatttcaacacggaatcggcacttgtaactagtaaagtatccagggccgtctttatctctcccaaatttgtcgattgcaatgacatggtcaacgcatgtagattaataattcctatttctggtgggaacagaaatataggcttattggcatcaattttctctccgatctgagatacatatccaatatcataacctttggcgtgctggataggtcttgtaatgggtttgtaatttctagtaacagctcttttgtaaactttgggtaatttggccatttcttgggcatactttttcttcaacaactcttgttgttgttgcaactgctgctccattaaaatctttcgttgcctctgttgctccaaaagtgcttgttgttgtcttttcatcatttcttcttgctgcctcctctctagctctagttctttctttgtctttttcttttgacgaggcttcttttgtttcttagcccttaatgcagcagcagctaattgttgctgttgctgctgttgttgtaagaattgttgttgctgctgctgctgttgttgttgttggtgtagctgctgttgtttcaatttgattgcatttacagcgttcattgacattggctgcggttgtggttgcggttgtggttgcggttgtggttgcggttgcggctgcggttgtagctgtggttgtggttgtggaggggaagcattactagtgccattgctactgctgttgccattagtattattggttatatttgagtaaacctgaactttctttagtaactcctggaaaaattgttggaaaaatatctttttggtttgggattcctttataccctcgggacttttcaaatacatctcgtaaggtattaagattttgtagtagattgctgtcaactgttgaacgtcaggaatttgcaacctttgagctaaaaccccccattgtttatttctagaaatttgctcaccaccaccaaatctttgtacgagcatgaaaaggatgaaaaggttaatctttctaccagcaatctctggtattgtctgcaaaggcatgttttcccttttgcagttttcaattaaagatttcataaacaattcgtactgcttattgttcagttctgtagatatccgtctttgtaaatctggattcaagttttgtagtacatttctctgttgttgctgctgagccgcaactgcagctgcagctgcagttgcaccttgaaaaccttgctgctgcgctggtgttggtgttggcgcctgtgctggtgattgggcctgggcctgggcctgggcctgggcttgggcttgggcttgggcttgggcttgtgcttgggcttgtgcttgggcttgtgcctgtgcctgagcctgtgcttgggcttgtgcctgggctcgagcttgcgcctgtatttgtgcctgagcctgcgcctgggctcgagcttgcgcctgtacttgagcctgtgcctgagcctgctgggccgcctgcgcttgttgttgtttttttcgcagtgctgcaaacgttgccgccctgtccgtgaaaacactgctattaccgtgaagaacgccttcactagccgctgaagcaggagagcctgctaaactcctgccatcgttaccagcaataggagaaccccggtttgacaaaatctgctgtggcgtagcaccttcattaccaccgtttgtaccgctgttcatcatcagaatttgctgaggcagcccagcctggtttgtaaatacctgctgaggagacatagaggctccgggattagaattgggacgacttatctcgctgatggaatttcttgccagtatcgcctgcggtgagacactgttaccgttgtgctcatttgtattgttgttgttaccactgaccccgttagaatcgaaaaagcttgaaaaatcatcttcgtctccattctcattgccgtcaagggcggcattgtttatacctggagaggcagccgccgaagggtagaaatccatcttgtgtatttcagtgtatatgtatgcgttaatgcgtattcaaaacgcaatagggatcaaaaagaagaaaagggccggtttgacaataaactagttaattaatttaatttagtttttcacaacacgaaatcccaataataagaagtcgcgtaagaaacggttcaaatgtggtttcgaatccctctacttttgcactgtgttgtacttttgagggattctacggttttttgtcttgtttttcggccatcgtcagaatgtaaaaaaattttccttaggggtttaagttactcgggccgtttacgaagtgcataaaaaggcaaatcattagcgatagcagtagataattggaggactctgatgtcaaaggcacactatacattttagatgccttaggtgctcttgatgttctagttatggagagtcgtggcctttctctttcaatttcttgcatcttattagccccgtagctgtgtttctaagaattcacagatgcgctacatgtaaatatgacgcattggcgtcgtgtttatctacatatgggagtaatagtgatttatggtagtattatgtaacttatttattgtaaattacgaggggaaacaaaagaaaaaggaaaatcaatggaacaaccttgaaaaccatttcctattcttgtcttccaaaagacgggtgtagtgttgcatctcatcccaacaatccctaccaaaattacaacctgccatattaactataaaatccttctccttatcgtcgtagaagaacctcttatcgtcttgaaactctgagcaagcacctggtgggaatgaatttattgatcttaatggtaagaagccgacacgtgacctgatccagccttgattagcgtaaagggcttccaatgcatcctgttccttgtgctcccagtacatgtgcttttgttcgtaaagagcgggatcccaccaaagttctagtaccatgtgtgcccactcggtatttctgataaaaaatgaacccaaattaaacccaccacaatcttgtgtaatcaataaattcaattcctcagtgtaatcgacgtaggggatatcgagcggtatgttcaatgggttgaaatcttgtaaagtacgcgaagttacgttgttcagacggtcaaaaatatgttcttccaatgaaaactctggttccatgattaaggtatccaaatccaaccaccaaaaccattccgcgtttggaaattctctcattgcttgtcttaatatatcaaccttttgccatccttcacgatattcatgagaataacgttttgcaacggtctgatctttgatagttaatccataaccatgctttttagcataagattttttattgttgattgaaagcctttctattgcccaatcttgttcgttcttccattttaaaacacctccaccttcatttgcggctaaaattataacaattctaggttcacgacgccaattggtcaatttgtaaactagtttattccaccaagacatgtattgcgtaggatcaactcttgcatcaccttctccattaccatacaaatatctgtttagtaaatttggtggatatttaacattttgattgtttttcaaagcttgtgcaatatcagatctgctgtcagcagctgatgtttttgatccattatcacgtatccaaaatattaaaaatgttaccgttaaaaatacaagcagtggttttttgaatcggctgaattgacccattttaacgaaatttcgtattgcagccccagagaaaaagctaacaaccaatgctgcttcttcctatccaatgatttctcctgtttctgcaggtaggtgttctatttatcaatgttgaccattcattatattgatcgatgcccgtaatacgctaaaaaaaaaaaaaaagaaaatgtgtgcaacagtcctcggcaatcattatggacgggaatataaacattagacaatgggatttacgctgaacgtatttatgagtattaaaaattgaattcatttctaaaggattgtaaatccatgccaggttttgctcgttctagtagatcacgtctgtccatagcgacaaacgctctctttagtgtctccaatatattgttactgtccacagtcatcgatggattcgttgcaccgccactgacttcgtgcatacttagtgccgtaagtaaatgttctgcagcttccttgtagcaacctatgttaatggatgagactgccaagttgtaccgagctcttacaaatgatggtttcagctgtagagccctgtgataagcttgaattgcctcttctgatctactcgagttggctaatgaggcaccgagacgattccacatcaattcatcattagagtttacacttagcgcagctttaaaacagtcaatagtcttgtcgaactgatcatccacatagaataaaagacctagacacaactgcacatcgggatccacttgcggtaagcgattggcaatttgtaaaaacctgttccttacgctcacatttaacttgtatctttccgtttcattatctattgccgacccatcggtattctcaatcaaatcgggatatttggcctccacccaacgatttaacattgtgaatgcactcacatcatagccttcattgatataactaatagccagagacttcattgcctccacattatgttggtctaattttaaacactgttccagcgcgtttataccgcttaactccttttcattttgagtttgtacttcacccagtttcaaccaggcatccacatgttggggatcttcttgtactgctgcttcgaatgccaaagctgcttcactaagtttagcaccattctccataaggacacaaccaatttcatatgcattggggttgtgtaaaaattggttttccccttcgaatttgtactccgaattaccacttactctgccgttcagaaatctttggtaatcattttcccactcttgtgtaccggctaaatcctctgttaaaagatcatctgcatccttttgtaaagaatcccacacttgttgaaattcactctggtactgatcccctacaatgtcattttcttgcgttgcttcttgtactggagtctcctctgtctgagcatcttgaaggtttaagttttccgctacttcgctctctaatgctttgaattgttcatcccaacttttttgttgatccacattatgtgattgttgttgctgttgttgttgttgctgttgtggatgcatcatggaaggacccatcatcattctaggccccgtgaccataggcatgttctgcatacccatacctctataactgtaacttggaccatttcgttgctgttgtgtttgtcttggttgttgtaactgttgagaactaccgtccttgaattgaaattcctgtgaccatgcattctgttgcaagggagcgccaggcgattcccttacggatggtgtcatattaacacttgaagaagatccagtcgcatttcgtaaagccattggttgttgacccaatctcatctgtggattcgacgtactaccgtcattcataaaattctgcatatgaaatctggcggcatctgacataccattctgagtgcttttaaactgttgaggtgatggttcgtgtgtcatagacatagatgacccatgctggagagatctatcacgttgagtatgcttattgaattgtgctaggggattgctccctatagaacactctgccgcgttcatgttcaaactgtaatggggagaatgatatgaagaagggacagatagaaattaaaaattctgagagtagaatgtaatgctgataaatattaatatgggagcggctattggtcctcctcaaaacgtctttctgtattcctatgctctggaacacattagttgctgtaaatatgatatattatgtacagctcttgattatatgcctaaccccaacatgaatcatagtttggacttcgtctagagtgattcttgaaaataaccttttcccggaattgagaatctttcttccgactggagaccatttacccggcctacccatgagggcggaaaaggataataccgattttcagcggctaatttgccaaattgtccatgttgaaaatgtaaggtcaccaaagagactagttagtagtacaaatgggcagcaggcaaccacagaggcagaagagcctattttgtgtgcctgcggtatcttggtgttaccctgacagcttgatatttcaacatgtataaccgatgagatgagatgagatgaggtacgtcggagagatgaaagatatccttaatagtggatgatttcagagctatggctagaccccctgatatcagtcagttgctatcgggcactgataaatctgctaatggattacaggagttggaaaagcccaaattcttgactaaagctcagagacagcagttacttttaaataagagtcaaaagagggaggatattattcctacagtggtgaaaccgaggaataaggaatctgaagttatacaaaaagaagatgaagagtattcgcagactagtagacctaaatttaattatgatacgaacgaacaagaagatactctgtcaaactacgaaccgatagttagtattagggcgaaggatttaatgcaaagaccaagggattctattgaacaattttatatgggaaagcattggactgaaaagaccagacaggaaatgtccgaccgagattggaggatttttaaagaagactttggtattaccatcagaggtggatctgtggaaaatccattgagatcgtggtatgaacttaagaatgaacaaatggcagatgcaattgttaagaatttgaaataccatgaacctacaccaattcaaagggctgctgtaccgaacgtttgtaataagaagtttagagatttgttaggtatagcgtcaacgggttcaggtaagactttggcatttttaattccgatattgatgaaaattgaccaattaccatctagaccattggttttaaagaaaatggatgggcccctagcgttaatcttggcccctacaagagaactagcgcaacaaattgaaaaagaagcagaagaattgattgatgcgtggggtaaaaactgtgaagtagcgtctattgtaggtggtcattcaattgaagagattagtttacaagtgtcgcaagggactgacattctagttgcaacgcctggtcgtttaattgattgtctagaaaatcatgtattgacgttgggtaaagtggaaacattagtactggatgaagctgatagaatgattgatatggggtttgaagagcaggtcacttcgatccttggaaatttgacccagaagcggcaaactatgatgtttaccgcttcgatgactccaggtactgaaaagattgcagcaggctacttgaagaatccagtacgagtaacggtcagcggctcacaaggatctacaccaatgattcgacaacttgttgaacatatcggtagtgaagaacagaggttccagagaatcgttgaatttttaccacaatatagagcaccgattatcatattcattaattacaagagagcagcagattggcttgtacaaaaattttacaaagagactcaatacaaggttacagtattatacggatccaaatcacaagaacaaagagaacagtctttgcaattattgagaaagggtaaagtgcaaataatgattgctactaatgtagcagcaagaggtttagacgtacctgatgtgtctctggtaataaattttcaactttctaaaacttttgaagactatgtgcatagaattggtagaactggtagagctggtcatgaaggtaccgctattacatttttagatgatgaagatccagaattggtaaaagagttgtacaagtacctgcaagagaataatccaactggtgcaaacaactttgctcctcgattgaaggaaaaatatagattaggtaaaaggcgtattgaagaagttttgtattgatatgaagaataacgatcatcgtcgtttgacgaaaaacaaaatgtagcgagatgcaaactaaacattaacaaaacacaattaaaaaaaaactattgttacaaattctataaaggccctaccacgtcccatgtactcattcgtcttctgatgaagatgatggatagtcgactaaagaagccttttgcggctcttctgtcttttgacgtttctcttttgcattttcactcttgaaattagtcttcctctttcgcagtttattcaacacttcaccgctaaaaatccttccatgtttttcttcggctgattcattttcaccttttttgacttcctctgcagcttgggtttcattgcttttatccagtagatgaaccattagatctaaagtctcctgtcttttttcctcttcttcctccctcttagctcttggatttggatcgtcatgagcccacttcacttgtaagcccgttagttgtaatctttcctcccattctctatcacttggtatgagtaatgattgattggcaaccacttctttggcaaactctgcattacactgccttttaaatttaataaatgcacaattcttggattccaaataatgtaatttatcaatttcacctaattctgagaagagaaatcgtatgcgattttctatttggtttgattttaatggtctgttacctaaagctgaactaatcccaccaacataaagagttttattatgttttctaaatgaaccaacaccggccatatcatctctgtaaaatgcaaacttttccctaccaaaacaatccaaaacatctgttttagctgctaatcttaacatatcttcattctctggaacatggtgcatatactgacattttttacctagacagcacattcccttggcaaaataaaggcaaaagaattgtgtttcctgtttatcacctagcgttttaccagaatgtagtttcggatctaatctgaaggggcttacgaatctactttgaccaccttgaccttgagaccatttattataccatatgttaaacactaacccagtttgaggtggtatagatgacggcaaatctgattctttcacttggactttagcagacctttctctccatgttttggacatagtgctgggtttactagtaaacgtaggatcgtctgttttgtatactccatactgtttaagtactactttgcttgatatgatgagatgggaagcggtgagaagttgaaaaaaaaatatctcccgggggtgattcgaacacccgatatccagataacttttcacattacagtctggcgccttaaaccaacttggccaccgagagttattaaactgttgaaaacagataaagcagttttcgactataagacaaagaagatttggccaatttatatcaaccgaggaccaattatggtaaatgtgcaataacaagagcccatttgtttaggagataatatttaattcaagagaatactagactgttatgtttcttattgttcttcctatatgaatactagtctaagaagttccaaccagcttgaacgtagctatagcacaaaggctcagcgcgctattagaaacaattgtcttttctctgtagatcacatactatatcagtccaaagacaacagtgataaacttctattccttactatattgatctaacctgctcttagatattgtatctatattcttgggtagcccttaatctcctgaggagtagaagtaataacctcagaataatggttttatagtatatcgttctagctttcaaaatatcccaatgagaactagctaattgcctcttttggatcttcttagtagtaatgtttaaacatgaagatttgatttgatgctaattcttcactttctgagagtatcaagatcagtaacctttaccttttttttaataaacctgaaagtataagaatgcacccacaaagacagttaacaatattttagaatgaaaggttaggtacacctggtatgttttacgcatactaaccgccaagctgaaatattctgaatattctgaacaagaaagaaatatatacagatctgccaatgggaactagcacttaagagccatgaggatactcagcggtctgcaattgaactagtctttgaatgggcacgcggctaatattcctccaccagttcagtaagcggtttctaaaatatacttgcaaaaaacatatgcatggaaaaccaagaaaaacgcagagaacatcgacacacgttctagaacttcaatggaaattatctagaagtcatactgctcaagaacctcggcgcttaaaatcaataaggagaatcttttagaggaggaaatacgatcatgaagaattggacagtgtgagatacaacaagtgtaatgagaaatctcaagagatttacacagcgttccggatatataaagctactttgggcgaagtgagtggttgggctaggcaaaataagtatattacttccaaatctaagcgacgagctcagaagagcaagttacatttgagggtatcaagatttggttacggggaaagtatacttccttaacttattacgaatcgctcttgctggaacaggtactcctgcgttccaaactagcactaagagtcatacatgcatacataagcaaaaagtaataataaagccaatatatcctgacaggggacaaatgcaacattcattaccagaaactgagaaaaaaaataaaacgaaaaaatctggaggatgcgaggttcgaactcgcgcggacaaccgtccaacagatcttaagtctgccgccttagaccactcggccaaccctcctcagtagtaatatagaagaaaagaattctatttggatactctacctctaggaagcactagtgttgtaatgaaatagcagataaatgagtatgagagacatctatggttaaagcaggtcaaatatttcaagattattgctaaatgaattcttttatagtttttatgccctatttttgtcaagagttcaattggaaaatgagattttaagaacatcctcggcatatcgtgaaacttaagatgagaagagctaatcgctaacggtaaagagattagcttgaaagagtggtgagaacacttttcatggaactgccatcattcttgtcacaacaaccaccaccaggttatatacctggtataggtcgtggtgcaacagggttttctaccagaggggataagaaaggaccagccaaagtacccaagagattgcaaaatcaggatacagtaaaagcagtagacggtgattctaaggagcaggatgaagattcagaggctgataaagttttttcagatttagactcaaaattatcttcaagaaataggtccaaaaaacgtgaaggggaccagcaatctataccgcatcagtttgcagatttgaagagatcgttggctacagtcagtgaggaccagtggttaaatatacctgatgctggagattatacaagaaaacgcagaagggaaaggttagatgaacaattgaatagaaagacttatgcggctccggacaccttactcatgccacatgttaacctttctaagctaactgaagaaagagaaaagatgcttagtaggcagttggactctaatatctttgaaaaagaagattccaattctgtgaatgaagcccaaaagtatctaaacgacttggagacatttgaagcaggtccaagaggagatgaggaagatgtcaaaaagatgaggactattttacaatcctatagaaatgctgatcctaaaaaacctgaaggttgggttgccgcagcaagattggaagagaaagctcgaaaattaaagacggctagaaatattattgaacaggggtgtttggaatgccctagaaacgaagatgtttggttggaaaatatcagattgaatagtgcagatacacaacgttgtaaaacattagccgcccaaggtataaaatttaatccacaatctttgcagctatggatcaaagccgttgacttggaaagggaagttttaaataagcatagagtggttagaagttccctccaagaactaccactgtctgaagagttatggaaactggctgtcaaatacagcgctgacaaattcgaagctcaaaggattttacaaaaagcagtagaactgataccgactagcattgaactttgtagtgcattagttcatttacaaaattaccaagaggcaaaacacactttaaatgctgcaagaaaagccatgccccgtgaattgaaagtgtggattttagccgccgaggtggaggaaagtaaaggtgaagcagttactgatgaaagaattttgaaactgttaagtaaagggattaaacagttaaaagagaatggattggagattacattattgcaacttttaaaagaagcacaatcacttgtaaaagaaggcggtttaagaaccgctcatgcattgacacaagcggcactgtccgaatttcaagatgaatatgaagcgtctcgtgtggtgtcagaactatctgattcgattgtaaaggtagtgggattcaagattttgctcaaatcgaatccaactaaatacagcttctggcagtcgttgaagaagctttgtgagaagctgaataaaatggacgaattgtataatacttttgaaacacttctatttgacgaaagtgagaattttaggattttgaaacagaatcctctgttgtctctgatgtattccaaagaaatttggaaaaacggtcatgatatccctaaatcacttgaaatactcgatagagcacaaaatatcctgcctaattcattagaagtatggcttgcaaagttgaaattcttatgtcttaccgaccaagttgaactcgcccagaagagctttgcaatggcaatggaaagattgagagatagtcaagtgccacatttggagaaattgtattacaaatatatcagtttcttaaggtttcgtcgacaaaatactgccgctattaaaatgctcaatgaaacttgtatacccaaatttccgaattgcccaaaattttatcttcaactgggtcaaattcattatgatctgggtcaaaccgaggaatcacaaatggcttttgagagggggaccaaaatgttgcctcagggcattcctctgtggatctctctcgctaggattgaagagattgatcttaaacggcccgctaaagctcgttccatttttgaccttgccctcttaaagaatcccgctaatgaaacgctgtcattggcaagagctcagatggaggccagattaggcaattatgatcaggcaaggttcatcattcaacaatccttgcagaaacattcgaagagtgcaacattatgggctgaaaatattcgcatcctaccattaaagagagccaacgtcaagaaaaccgtgtttcaggatgcactgaaaaatacaaacaatagctgcgaaattttggtggaaatcggcatatccttctacaaagaattacagcatgagaccgctattaaatggtttgaaagagctactagatcgaacccatcgtatggtgattcctgggtttgggtcgccagatgctacaagaaattgaaccggaacatccaagaaatagtcaatcaggtagaaattcatgaaccaacgcatggtaatctatggataagtgtctctaagaagccagatacccagtactatagctgctcgaagattctcttgacacttttggagtcagagaatgtggtgtaaggcttttatgttaattattgaatccacttgaagtgacgattgagaaaaaaaaaaaaaaaattctaagtattccagaggaatttttccaataagcaatcgaatttccagtggttattattcctcagaatctcgagagataattatctgagttagcgagtcatcggggcaacttaccggtagcagggttagtagtagatcattcattgttcctgcaatgtcgtcaatgttaggcacatctgatcctggcactaataaaagtaatagtgacgaggttaaaccattgcagtcgtcaacctccgccaattatttatcgcctgcatcgcttgataacggattctctttaactgggccttctaggtttacacctgacttattttcgaagaagggtagtgcacctccagtaattggtagcatcgaattgactccatccgacgataagttgatggctacacccgaggccctagccagcgcgaatggagatatggggtctcagaagactgcaggtagtgtttcttctactgttaccgacggtgaaggtaaagtggtgaagaggaaatattctaggaatggatgtaccgagtgtaagagaagaaggatgaagtgtgatgaaaccaaacccacatgctggcaatgtgcaaggttaaatcgtgaatgtgtctacattctgaatgcaaagaataaaaaaagaaagccaagagaagctagaattaagtctaccgatcgtaataataaaaaaggcttggcgaagactaatggttccataccgcctgctgctgtggcagtggctgctgctgctgccgctgacgcgaataccaacaaattggaaaaagatatgatcaacaacatgcaggtgttggagcttccgaatgtgattagtgccagtaacatggatggatacgatgcgaacttgttgattcaaaatttgaacgatatggtcagtatgaagttgaatgattccttttctttaaatgaaggcttgaaagatttccatttacctgatctcgatattccagaattgatgcctcagtctaaggcttctgagaatagtgtaccaatttcatttttagtgaacaacgtgattacttttaacacaaggttgagttcttttcaattaggtggagttcatgacaaatacctagaagtttttttttatgattgtttggattccatagcaccgttttttcaaaatcaaggaaatcctctaagggatattatactttcatttgcccgtaacgagtcttatttgttatcagctacacttgctgtgggggcctctatagctcacaggaattcaaataaattagaggatgagagaaactactgtgcgtatttatcgcactgtttaagtcttttgggggaacaatttcaaaatgagtctaacgtgatgcataagattgaaccaataacattgacagttattatgttggcgtgggattgtattaacgcaatgaattcacagtggagatcacacttgaaaggtgttactgatctttttaaaaaaattaattcggggaattcttctaaagtcatgaatgttgccaaatgttggtttaaagtgatggaaacatttgctagtataagtacagtgcttgggggatcgctaactgatgagcaagatatggatttgatttttaacccgcaagatttccaatacattgactctttgaaatttctaaatattatgacgccgctaaatgaatttaacttattaaggggtcacaaagaagattttgatcttgtaatcaaagaagtgattaaagccttgaatgcaatcagagatcaggaaaaagaacattttgttggtgaagaagagatcttccccaaaaatttggattacctacaatggacaccggaagccgatactaagcaaacactctcttattttaatacacaaaagattttggtggaaattgacaaacagttagaatatgaattcattgataaatccggtattataccgccggagagtcaatcacatcctgataatagtcacattgacgataatgccattgatgtagtagttttgagaagtggtgaaagaattgctatcagttggtatgatatttcacatcaaacacaagtcctttccgtcttactgacggttttactgaaactcttgggtataccgaaggaatcaataaccatccaacaggtggtcaagaagataatgtcttttttcaaattcttagatagtgatgaagcaccgcagaattcaagaacttgttacagtaattttgcagtcctcattgcgggtttcaatgctttggatgagcccaccagagatctggtgagagcttactataaattgaacggtggtcgtttccgcaaactaacggaacacaatctcaataggttgagaaaagtttggtacggcaatgatgggggcaattatagacttgtcgacgaggacgttttaacctggtaaataaagttttatataaacagttgtaatttgttttgtttttctacccttaatctattgtcattagacccagtatggagtcaactacactggcggctatggtgcttgtaatatcaccattagtatcgtaagctggtgctacttctactacatcagcaccaacaatgttaagaccttctaaaccatccaaaatggttaaaatttctctagcactaaatccacctggttctggagtacctgttcccggtgctaccgccatatcgatactgtcgatatctagagtgagatacacgggccatccagtaacatgctgcttgatacgatctactatgcccttgatacctacaatgtcaatatcccttgcaacaattttttcaaatccacattcgaaatcgtgcttttcatcatcgggtccgagaaaaggtgctcttataccaacgtggatagaattgttaggtgctaaataacccttttcatgagcataatgtaaaaaggtaccatgatttagagctgtagacttcgtaatgttaccacccaagactctaggatcccatgaatcgatatgagaatcgaagtgaattaccgctaaacgaccccattgctcataagcggacctcaaattcatcaaagttacggtatgatcaccaccgagagtaataatttttggtggttgactaggatccttgacacttttgtttttatggatagttctttgacccctatacagctggtttaacgctactctgttgtcgaatggggacatgggtacatctccgcaatcgactaatttgtaaccggcattatatggatccaattgacgcaatttagagccggggaaacctcttacaggtgatacaccactacctaaccgacgagaaccctgcctaatgccattaggaccaaagcgtgcacctggtctaaaagaagtggaagtatcgtagggtgcccccacaatggcaatatcaaaatcctcagcgccgggtgtaaagcagcgagcaattggtaagtgtgcgaacgaaactataccagcaaaaattactaaatctgaaccaagtccgtcgcttggcaattgaactgggttctcgttataaaatccgcaacgagctctaaactcctcatcatcttcgtctgatggagtgatcttagaatgcaaggattgcatctcaaatccttctcgagagataagcaagtcaccataaagttgatcaactagtgatgtattgtcgacttcggcttcaaacccgtgctggggtaaaacagaggcactaacgaaacggcccaaagtggcgactgataatgttaacgtgtagatcaaacgcatcctttgagcgacagtatccttcgctaattgtcctcattctaccgttctagagatctccttcacttttatatgtgtttgctgataaggagccgccagtacaatacaaatttcatgtctcggaaaaaaatccgccgaccaatacgtaatcagtgatttacagctcggaaaaagtcttccctttgaaactattttttttttttcactgagtcatccccgagggaagttaacctcgaaaccggtgaaatacttcgagaagagagggcctaataaaagagtctctgtgaactatggtaagagaatatgtttagccagattcacttgcaaagaggttcaccagaaagtttgccaaatggtacatcaacaggctgaaaacgagacagaggatagccgtttaattagagcgggtgggagttatggggcttgtccgtgtgatgagttaggagaaaatgaagaggatttcacaaagatcacgacttattttgatgaatttatccaaattttgcgcaaatcacttccgcttgcccttactctccttttacaaaatttaatatcttccgtttcactgctgttcgttggtaggttaggttcgctcgtgttgggatctgtgacgcttgctaatgttatcttcaatgctactgcagtggttttcctcggtttagccacatgccttgatacactgtgcccccaggcatatggagctgggaactacactcttgtagggttgtatttccaaagatgtataatcattagcaccatagtatctattcctatcagttttgtgtggattttttcgaaaccgctgctgaacttggtagccaaagacgccgaattgattaacatctcatcacagtatttgaaatgtatggttggatgtattcctggctacattgtatttgaatgtgggaaaaaatatatgcaggcccaaggtgatttccatacggctcaaatgattcttttaattggatttccattcagcattcttgccaattacatctttattttgaattcacctttaggttacttgggagcgcccttggcgtcttcattgacctttactctaatgggaatcctaatggcatgcgctatgctgcgtgatcgtaagtgttggcatgaatttcattggaaaaccgttatacatggatgggaacccttaattagacttgcagttcctggaattattatgatagaggctgaattcttggcatttgagtccctgacagtgctagcggcaagattcgaaactactgaattggcctcgcaagctgtagctacttccgttcagtccatttccttccaaattccattcgcggtttccattgccgcttcaaaccgaatttccacacatgtgggccgcggaaagattcccgattgccaaatcgctacaaggtccacattgttctacatgggacccgcagtgagtatgctgaatctagtaggattactcggcggaaggtatttcgtgtcttcgttattcaccagtgatcctgcagttatacagagagccgccaagctaatatctgtgatagccatcaaccaaatctgggacgcatacaacgtgctcggagcaggatgcctcagagcacaaggtcgtcaaaacataggtggttacctaaacttagtagcatattacgtgtttggaatgccactggcgatatatttaggattctatcttgattggcaagcattcggattttggatcggcctcggattcggtattttcgcactagcaatcggtgaaatgtactgtgtctatcgttccgattggcctttaattatgttacaatctgaactactacatggagcggcctagttacctctattgtatgtccttctttccgtccttccctgttgggaacctcattcttttggtacattcgcgctgtactgggacgagaagtagcaaaagtttgtttttttagcagcagatacaagcggtgcgctcaatggggaaatgtaatggcgagtgatcatcagcttccaaataggagatgtcgttcaaacgggtacaaagctaataaccgtttttggtttccctgtccaaaaaggggcagtatccctcccctcccgccgagatttacatgccaactaaaataacataatgtgataaaacttactattaacgtatgaatacatactttcttaaactgccttccaatcaatgagtagtcttccagtagatcttaccaaactttctaccttgttctcttgcaatcttcttttcaatcaacgacggttccctttcaccctctggacctgaaatggtaccggcaccccatgggccaccacctttaaccttgtccatcctactcaattttttcataacgttgtagtaacccagcggcacgtagatcataccgtggtgtacaagggtcgtcacagcacttgcaatcgtattttcattgcctccaccgctgccggtgcaaacgaatacacctgctaacttaccgtgtaaggagcctttaatccatagtgtgttagtggcatcccaaaatgcggaccattgagctggcatgttaccaaacctagttggaatacctagtaaaaacgcatcgtatttctctagtacttctctattagcaatagggtaattggttggcttgccacctagttccttaacggtatcagcatcaaaagtttcgggaacttgaaaaatatcacattgaatgccattgagttcaacaccttccttctcaatctctgctaaagccgctatatgttcatgtagcgaatacaaaattatagcgattgccatttttaagatgaacaaaagtcaattgagatggttcttctttcttgttgttgttaaaaagtgttgttctttgttttccttcaagtatagcttgtagtatatacttttttcgagtaaatcctagtcatccctatatatgatgcccctagtactgaattcgtcactctcaggaattacgtcgctcaatcggtacaaacagccacccttagaaggttgcccgactttgctggtacctaaatgttcactgccagtggtaacaaacaaatccgagccaacgacagcacagcaagaaactcgcggggtctcctcaggaagcaaaatttcttgcaatagcgctccatccttcgtagaaaaaacttgcaccttagaatggccccagatggaaacaaacaacaattcaccattagaacttaaacaacttccatctggttctgggagatttccctctggatccgtactgtactgtgtaacatcaataaatttttctctttcttgaaatccgtgctttgttctccaaatgcatgaattcatagaatccgtaacaaacatatactcacccacccagtagagagagttaggaattgaaatgcgtggccaaaacacgtcaatcttcttcgaaactaaattgattttaaatatgacaccttcgtctgtcgtctcttgatcaaagtcattaatcaatccaatgtacaagtcttcgccatgcacgttaccgtcattgcttcttaaccgcttcaatctttcgctgtcaagaccgctttcgctgtacttgaccacatatttccatgagccgccgaactgtccgtgcgctatcccttccttggcggcaaacagaaactcctccacctgtgtatcattgccatcactactgctgcgcttcaatatggggaaaacggccccgatagaaccgctgccatctgcatggaaaacatctgtaacgcctgtatccattcttctgcggtacaccttggccctgtaaatgtcgacccatagaagggtacgagcgggggagacgtacactatgccttcacttagaactgcatctggaactgcaacaaacggttcgactttactgtagtcttgtttactcacttgcataataatggtaacagtaatatgtacgttagtgctaatgctaatgtatgggtcggtagactatcaccctagctagccaagcaattgttcttgtgagtgtgtctctatgtattatgttgtattcgcttaacaccctcctttaaatccctcacctcgcgacaaggcccttccccacaggcttggggcacaattcttccctccagacagcctcacccctaatgctgagggatttcggcagtaagaccatgtaacgcacggcttctgtttacccgagatcgccatgacaacgacacagacaaagcgctaaagcgctaaagcgctaatacgaaacaaaggcactctgtaacaacatattgttagagtgtgtatttaaggatactatggctacaggactcatataacaaagagagaggatgatccattaattaatctggcaaccattcctatatagtcctccaaaaactgacccgtaagtagtacgctcgcttattgacgatacccgaaagagacaagtgatttgcagacttgcatatagaaatgaatcagtttattgatattcataagaggggcggtaatcaagccgtgacaatcaataaaccatacaatgtggacattcacatcaccaaaaatggttcatcctggttttgggcggcgttttgtatttttaccgcgcttgccatgttggttataattttaatgtttagaaaacccgccaatgagcgtcttttctactataccggattcgcacctgttatgttcatggcgcttaactatttcactttggcatcgaatttggggtggattccagtcaaagtgaaatataaacatgcgacaacggctagtgaacatggacaccttggtacgaggcaagttttttactctcgttacattggttggtttatggcattcccatggccaattatacaagcctctttgctcggtaataccccgctatggcagattgcctttaacattggtttaaccgaaatttatgtggttgttatgttgtttggcgctgtcgtccatactacttacaaatgggggtactttgtgattgcaattgctgcaggtatcattacctgcattagcgtaatgaccactactagaaatttagtcagaaatatcagtcccatcgttttgaagtgttttagaatttatttttacatcgttatgttattttggttcctctatccgataagttttgcactttctgagggtggtaatgttatgcaaccagattctgaaggtgccttttatggtattttggatgtgctgtttttgggttttttacctgtgctgtttattcccgtagcttcctacattggatttgataagttaggattgaacaaaaccgttaatcattatggacaagattcatctccagcggaaaatgcagtttcaagaccacccgcaccgctaccaaaaccaccaccttcgagcggcgccaaggattccagtaagggaccgggtgtcaaacaaccaggtaaaaagacaaagaaggtaaagagggtaaagaaagttatgagacctgttcaaaaacctgctgaaagacctccaagtgaagaacatgtcggtgaaaagatgagtgaacccgctgaagggaccagtgaacctactgaaaaggtaagtgagcccgctgaaaagggtaccccagacaaatcagaggaatattaataccattatttttttttattcatttccttttcatctttggattgcttattagagccatttccgttcatgcggttgggttcatacgctattgtataacatttttatatatttcttctcagtgataaaaaaggcaaggtggggacgcaacgtaaatcttgtttaactttttgtttcagtacggacactttcggagaatatgctcgaacagtttgcatactctgtcaaagcatttaatctaaacagatacttcactgtcgccgagacaaccgcagtgcggctcgaataccgtggcggctattttcgtgattcctgagacaaggagagacgtttcctagttaccggctatgtagtagccgtatacgcttttttctcgaggggctttgctctcggactatgttgcgaattttcgcttgcccctcttttttttacttttttttttttttttttttttccggtttctcccttattttgtatgtaatatttaataatacgatgcgtattactacatgcattagtcgtacgtattttgggtatattactacttgtattactacttgtattagaagcggttgtcacgtaaaacagttcaaattaattagttatcttagtaagtttattacttgagtgtattctttgtttttctcttggagtgtatctgcccttcgatgattcttctatttctttgtcattcgttgctgtctctgttagtaaaaaatttgtcagtttaacgcaaggcgtgtaaacgttctgtcaacacagtagcaaaaaggtatatataaggatgatgggatcttgactcgaattacaatcgtttgtcttgttatttgtagattcattttttaacacagtatagtacaactactacaactataaacatacaatacaaagcaatggctccaaacgttgcaattatcatttattctttatacggtcacaccgctattttggctgaagctgaaaagagaggtgttgaagccgctggtggtaaagctgacattttccaagtccctgaaactttgtccccagaagttgtcaaggctatgggaggtgctccaaagccagactacccaattgccactgctgacaccttggttaactacaacgcctttttgttcggtatcccaaccagatttggtaacttcccagctcaatggaaagctttctgggaccacaccggtggtctatgggttaaaggtgctttgcaaggtaaggttgcaggtgtcttcatctctaccggtaccggtggtggtaacgaaatgactgttgttaactccttgtcagttttggctcaccatggtatcatctacgttccattgggttacgctaatgctttcaaggaattgactaacttggaagaacctcacggtggttccccatggggtgcaggtactcttgccgctgctgatggttccagaaagccatctgagttggaattgtccattcacgaaatccaaggtaagaccttcactgaaactgtcagaaagttttgaatttggtgacctccattgactctatttagtaacaagtcaggtacttcttttgctttttaaattttattatgtagaggaggaattttaagaaaaaaaaacggatttatattagtctttaaccatctcattgataggccttgtaccttgtagggcatgttccgatgcacacgatctcatctgctccagtagcggcacacagttgttaacagaacgggtatccatgttatctctaacgcatttctcgtagttttgcatcaaggatccacatttttccattacccttttcacactaggcactttattttgaatgcagcttgaaagatccttctgtctaaaagcacactgttgtaaatcatcacggtttgaagacacacatttatgatattccataaattcacgggggcagtatctagcgacgtcttccataataaactgatctaattgtgacattatgaatacttgtcttctcaaatatcagttgaacagtattggtagtaattatttgaatcacttgtcagttcaacatgagtttgaaaaaatggttgaaagcgaatcaccaagaaaataccaatattccaagtcaaaaattggtggtactagctgtttacaaattgatccaaatacgggtaaatttctattagcttgtggtaatgatggttcacttggtatttggtcattagacgatagatgtcaagacgatgagttgtactgtaagaggattaaatttagtgccagaactggcagcaatgatgagccgatagcgataccaaccaataaaaatgctcagatggttcatagttttgaaaccaggaaaaacagatttagactatatcgacaatcctcttcaccattagcgcccgcgcaatcgcaatcacgtcctggccatcggtacggtataagatcatgtcagtggtttaaactggataatggtatgtttttcactggttctaacgacttgagcgtacaactgtgggatacaaatagtttggaggctgtccattcggtggatgttggtcatagggttaaccaaattgatacaactgatcattgcattgtagtagctacggaagatggctatccaagactcatcgacttaagaaatccaacaggaattacacatttaggttcaggtaccatgccgcacgagatgcttacggtccactgtaacccacaaaagacccacattgtagctacgggtgattctaatggtagtattaaactttgggatttgaggaaaagaaatcagttgttaatggaagtataccacgatactccaaggaaaagagctcatctaagctattgtcaagatttagcgtggaattccaatggttctcaattggcatcagttggtgctgacggtcgtatctatatttggtcaccatttaaccaatcacatcgtgcatcacaagtgggtccccacgatttaccacgtaccagacatttaagacgtacttctcaaagattgctctggtccgaaaactatatcttgtgtaatacggattacggtgaaattcaactcttagaccctgttcacaaaaaactctggactaagattgaagaccctgaaccaacttcatcgacctcgtcgacaacccagttctcgggaatggctctacaagataaactatctaatggtatggggctaaggctctatttaagtacaggtaactctatatacgaacacacatcataatgcgccgattccatgactcgaacctcgacccaaaattcctaccccgtgttgtcaaattcatctccctgatttcctttcttatttcatttgattcttcccatctgattcttgtcgaggcggaaaaataaagtaaaattaaaagtaactaaaaccatcttcaacacacaagagaatacataatttctaaaaaattttaaaaaagctaaaagggaattcgtatttggaggaaagtcgaagctttttgtgagacgtgtaggcatcggatccaacgctattagttgagctagccgacgttctcaatctctttttgttgttttttcacttgcaatattcaaccattgcgagaagcaagttgaagaaaaaaaaaaaaaagctctagtgcgccaaggatttttgttttccaaaggtgtctgctaacatttggactgactatctctaatactctgatctggcacttctctttggtttttttggcaaattccaagtaaagttagggggaacgtacccgattataataataaagtgaagaccagttctgttttgtttttttggttttggagaaaaaaagtgaataatgggagataatttagcagccttctttgctgatcgtgtttctcagtcacaaactacgcctgtaaaatcttatagtgctcctactacacctatatctggtgaccctctggacggtggtttgaaaaaactggggaaaacaaatgggaatggacaagatgacatgggaccaactgtttctatggcagttcacgctaatgatgacgattctttccacaaatctacttttaatttaaagagaactagatctatgggattattagatgagtatattgaccccactagaaaattactaggaagaaatgataatgaaaatcatcgtattaaccatggcagcaaaaatattcctctgaatgaaactactgttcgtgcacgtcaagttggtgaagatgaagacgaagatcaagctgatgatgaaggagcggaagataatgacgtagaagatgaagatattgatgaggatgaatattttgacgacaataggaacggtaggagggtggaaaggaccgaaagtgaatgggacgatgctaatagatcgatgtcagtctctcccccacctgcagatgatgctagtatcttgttaccacaagatgataacgatttgatgagagaacctgaaagacatgttgattatttgtcacacgagtggaatgaatcggatatttccaattcttggaaatacatcattttgaagaaaaagaagaaatcatctattgatcaagttaatgcggcaagattagagaatgcatcttggagaacctgggcaaaggcaagaaatcatttaaggaccgtttcaccagaaattgttaattggtcgaaggattctgatgttacctggttgtacggtccaattgtcagggaaagtgataatcacgataaagatgttgaaatggggtatggttcggacgacgaaacttcaaagaggatgagtacgccaagaaagaaacagaaggattctcatgctcctaaaccaattttgaagaagagaactgtacaagaaattttaaaggataattccctttggaaactaagtgaagctagaaagcacaaacatgaaggtagacattctacttcggcagcagatactagtgatatcatgtacgagccacacgatgcttacgatgattacgatgcattggcagctaaagtaaatgctcagtactatggtcctaagaaaacaaattctggtgctgaatttaatagtggtgatggtcataataaaagtgttgatggtagcagtgacaaacctacccacactactacaacaggtagtagtgaaacagtaccgcaggcggaggatccgttagcatcttctgttggaggtgagggttcaaacgacaaggctttaaagacgatcttaacgtcttcaaataatgatgggactggttccaaatcaaggcctggtagggacagacatatccatttcaatgatcgtgtagaacaatgtatggcgatagcagatccagattttgatagcgattttattgataatgaatcggatcaaggtgatgaggatgctgattcatatggttcaacaagcattattggtgaccgtagtggtgaaaccttagcacaagcggcaaattttggtagaaccagcggagattcagctacttcatcttctgatgatggagatgcggatgaagacgatgaggataattcaggattatttattagtccagcaatgccacgtagaactgactcagctacacattctccaattacagataattcatctacgggttctatgaaaaattcaaaactttccttaaatccgattattaaactgctaccagcaactacattaaatcacggatctgacgatgaagcttctgatgacagcgattataatggctatggtagttctgtttcccataacgttaacacatatcggggttacgattacatgtatgattacaactccgtgtacacgggagatacttcaagtttcttacccgtggaaaattgtgatgttgttgatgttcctgaaggtattggccttcacagtgcgattgctggtgacaacgcgtctacttatgaattcaaccatgctgccttatcagacttagatcacgaagtgcaggctgatgagcaacaacataaaattcacgaacaaccacaagcagcaacacaacaagaaccgaacactccttccttattaaacaatgattttgataattctggatttgatagtgacgaacaattcatagaagatagtcagtatcatagtagtgatgacgatgaagatgaagaagaagatttgggattaaaaagagctgtatcaatgggtagaagtagtagttctagttcgctaaaagatttatcaaatccacaaccgttaaacacaatcaacccacaatcaagaacttgtagtttcatctcaggtaaaccactaaactatgcaccatctttaccagaggataattctaatttcatcgatgttaatgacaattacgacaacggtaatcataaaaactttgacaccacgagtaatagtgatgacgataatagtaaattcgataacaagaacagtgttattagtagtgatggagataatcaaagacagaaaagttctcacatgcccctaaagcgagctccatcttcaccatttatcttcaactcggaaagtgaagatgaagatgaagacgatgaggcagatgaagaagacgatcataatattataagttgtagtcctaaaggtcccaatcttcaacatcaccaagaaattggtgattcaccaaaattctcactacaatctcattctaaaactgcaccgcctcaaagttctgtgatcttaccaactagcggtaagtctgcaactgcttcagggcctcaattatccgatttatccaaaagtattagaattaagaattcgctatcaccagcagaagtcggagctagtgatgtagctatcaccggtagtttttcacctgtgaatgagtcgataaaatccgtggttacaaatgaagggattatcggtaggggcgcatcatcaccgtttactaataatcaaaacactcataataacaatgagattagagatgtaaacagaaacttacaagactgtcatattgatgaaaatagatccaatggagttggtgagcaacgagactccagtgaaagtgtacaaaagatgatgcaaaatgcaagggaaattgcaaacaaatatttacattcgtggagaaaaggagacgggaattcacaaggcacaaaatcagataacaagaattcaggaacagattaaggatcggtattattatcattatcattatcattattatcattattactattttcacatgtgatttaaaaactcacatatacgcataaggcactaactaacatacatgggacatgtatgtatgtatacatgtattttagtgtatgtaaatatttgtcactggaactcttcttatcacgaatttgatatgtgaattgattaaattgaatgacctggagttagttgatccgttcctagcgatgattactttgtattcagatactacacgttctttagacggcccgagtttaaaggaaaaagcacctttgaattcaccggtctttggtcaaaataattgtaaatacagaggcgcccttctcaaactattagccgttggtcaagtggatttgatttcaatttagatcaagtggatttattcttgtacattatttcacatttctcaattggtcatgtcaaaggatgtcaaaaaagatgaaagaataggtgagaatgatgatttacaacaagccaattccgtggaaagtccccttaataccagtactccaaagatgacaaactccgattcatctccaaagctcacccgaacgccttcaatagatggatctttaaacgatgatttggttagtgtatcaggtaatgttggtaaattgttaccttcttcaagaatgagcatggattcattttcagttagaagtttagattcttcagcaattggtggaagaataagctcaaggccgtttgtatttgatcatagtaatcatagtggatctatggaatattcgccactgggtaataattcaatctttgaaattgttatgaacacaagaaggaaaaattggcttggatatccatcagtacaagatattcctccggtggtattaaccaaggatatagtagatcccgaaatacaaaatactgtaatgaattatgtgcaatccataggacctgaatgtgctgtttttgaaagttctaataatttgaaaattatcaacagaatcgaacagattaaacaactggaaattcatgataatggtaataataattttggtgatgaatctgaaactgcgttacaaaataaggaaaatctcaaagaattggagaaagtaccagatttctacttcagtaaaaatttccaattagataatccaagaactttccaaaaagtgcttaaaaatgtagatttacaattgggagaattgagtattgagagcaaaccacagagggaccatgcatattcggaattgagagatagacttaatgattacttggacgccgtcgaaggtcttttagtaggggaaatatccaaatcttctcataaatttttccatgcacttggtgatgttgatcttatacaacgaaaggctgaaagtactgtgaatgaattggatcttctggtggaaaatgcggatattttggataaggaaaagatccaaaggaggattgatcttttacaaaaaacctttaaaaggaaaaatgtacaaaaattggaacaaggccttttacaagttaaacaagttcttctacgcactgaggaatgtagaaagctttatgagaaggaacaatatgatatatgtctgcatatgattaaatcaatcgatcttttgatcaaaggcgatggttctcaagacaaagcggttcaacaatgggttcaaggttggcctttcaaactggccgatttaaaatctgtacctgctcttacagaaacaagggaatttttgactaatatgaagatagaaatcggtggcaaatattctttacaattatgttcagtgcttttgggagacgtcagaaactattgcaaatctgtaagcagtaaggctactttgaataggttacagaacaatacccgtgaaaagaaatttttagatatcgacgaaggatttcgtggtaaagttgctaatattgttcatcaattaagaaggtgtgaagaacttgcaagtgcgctgagcctatatcaggacaaatgtatcgcagaaataaaatctattatcaagagttatttaccacaagagactctgccatcagaatcgtcatctgaggataaaaaaattggtactcctggtacccaacagtatccacaacaacaacagcaacagcctgtaaacaatggatctaaactttctaagctcataaaagaacaaacacccatggactttcaagacatgttggttcacatctttacacatgctagtgaagctctcagaagattttacagacatcaaaagcttctgctggatctatccttgaatgaaattgtatcggccaatgatccaaatgaaaaccaacaaagtatgattacccagttggatattcgtaatggtattaatgaaaccatacggatactgcaattacgtactggtaagatcattgcggtaaggcgtgagctgacttgcaacttacgatatgatcatttcctagagctttattccatatgtgttcttttcatccaagaatgtgaagctgtaagtggagaattcctcacgaggtatctaagtgacgtcttagccgctcaaattaagaacttcatagtcaatcaaagctctaaaaatattaggacgattcagagaaagatcgaatcagagacatggactccatttgtggtagatccatcagtgcagagggacgtaaatgatattgtgtctagtatggaattagaccccattgactggattaaaaagtctgatttagttagggcaagtgaagaagacgaaaagaatgatgacgacaaggagaacgaaaagaaggaagctcaagctggtcataaaaaatctgttgtggtcgaagataatacatttgttgcaagcgactcattattaaccaacatagggctcatcaaggaagttttcatccttgcagtgaatttacccagtgcgtacttggcaaattttgagaaaatgtgctacgatttattgaggtatttcaacatctttgcggtagcggctctcaatgatcctgcaaagagctcattacaatcaaataaaaattattccatcatgggagaatctctggactgtctctcacgctttgtacatattgtgcaaaggttcttccaaagactgtccaatttcaacaaggactattcgtcattggaccagagtcactacaaccatctacttcatcagtatcacatgtcctcagagaaaatctacatggccaatgcgccaccgccaccggcgcctgtatagagcaaatattgaaagaaaattattcacgttacgattaagaccattttgaatcttaaattcctcgcacttattctatattactcttattactgtcgttacttacagctccacacacgtcgttacccgcacttggtgattttttctctaccgtgattttcaggccgagtttgacaactttgagggactcaaagaacgtttaaagtttataatagagagtcgtgtagcgtttaccctgacaacacgttagcaggttcaccagaagccgataactaggttaaggttaatcgagtatatctttggtattgcgctgttgtgttttgtgtgtcatcgtgagtgtttatttgcacaccattgaaatatggctagtaatcaagagaagcactatcgcgaccagcctcatcatctgcctcacgagggcggttcgagacatgaaagtgtagaggaagctgttttcaaatacgttggtgttggtttacaaaatgatgatgacaatcccaaggatcccaagtcctacgataagcgagacggtagtaatgtggtagatacaagtaaacctggagatggaaatcagggaaatgatatggattggctgtttaggaatgcacacaatgacgaagatattggtggtgataataatgagaattcaccccgattccagtcggtagctttggctgctattgctgcggcttatggctcaggtgcaggtgcaggttccggagaacacaagaggagaagagctagggatggtggtgaagctagtgatggtgaagatgatgcaaatggcaataatgataacagtaacaatggtggaagacgtaaaagttctaaaaaatctaaaaagaataaagagaaaagggctaaattacaattggcggtagatcctgaattagccactctagatgattcagatgttactagtcatgatcagttagtgcgtaaggctatcatggatacagattctattgctcaacatcccgatttccaacaatatttaaatacagatgaggaaccccagaaatcaaaagattctatgaaacataaagataaaaatcatcgcccagtgggcgatcatgaagatgaagatgaagaggaggaggatgaggaagatgaagatgaagatgaagattctagggatacaagagatgtggatcctgctgtagtggaagctgctgctagggatgaggcagaagatgacaatttagatgatgttacaaaacaatattcagaattacaaaaggattcagttatggataaccctgtgacgaaatcgatacagaagaaagactacagagaagtactacccaaagtcctttcatcttcggatatcggtgtagatacggatgtatcacatttgattcaatctgctgcttctaaagcgtctgctatcattggcacaacaagtcaatcgagtggtaaaagttttgatcaagcagaagaagctgcattggaacaattcattacagaatatcaaactattaaaaatttggataggcaacagatttgtgagagaatttggagtaatgaaagacgcaaagacgatttttggagcaatatttgtaaagttttaccctataggacgagatcatcaatctataaacacgttaggaggaaataccatgtttttgaacagcgtggtaaatggacccctcaggaggatgcagaattagcacgtttatgtgtggagaaggagggtcagtggtcagaaattggccgtgcattaggtagaatgcctgaggattgtagagaccgttggagaaattacgttaaatgtggttcaaacagagcttccaacaaatggtcacctcaagaggaagaattattgaaaagagtaattactgaaatgttagaggaatcacaaagacatcatacgaggggtacagatcatttagtacaagaaagtgacgaagaagaggatgtaccagcaagtgatgatgaaaagcaagattttgacaagaaggatggcagaaaatctaatcgaaagacgtcctttaaggatgtaattaactggaccatagtcagcgaacgtatgggcggtacgaggtcgcgtatccaatgtcgttataaatggaacaagcttgttaagaaggaagctattgctaagattcaatcgattacagaaactgacaagcgttggattttggaaaaattaagagatctaggttttacagaagactcacaagtggactgggaagaattagccgccctgaagccgggagtcaaatggacggggacggaattaaaactatgttacgaaaggatgagaagcggagtacggtattacaagcaaaagtctattaatgatatatctaaggaactcttagaaatgcttgacggttctgttccgttggaggctaaatcgaattaagacaaaacgaaatgaatgaacattactgccgaaaccgttgtataataataataaaaagaatcatagaaagaaattcatggaggaattacagtattactaataatgtgttcaaagaacaaaaagatttgtaactaatgatcgtctaactaattattgtagaaattaacgtttatgaaaaaccgaccgcggttctcttttttctttttcacacactcttcagagttgcatttttattttaaacacattatacaaatgattatctgaacaagagaaaaacggatgttcttgtgctagtttaaaaccttagaatttagtgaattgcttcttagcactagcgttagcagcaaccttaacgacgttaaatctaacggtcttggagattggtctgcattgaccagcggtaatgatgtcaccaacgttgatacggaaagctggagaaacgtggactggaacgttcttgtgtctcttttcgtatctgttgtacttgggcacgtagtgcaagtagtctcttctcataatgacggtacggtgcatcttagtagagacaacgacaccagtcaagatcttaccacggatggagaccataccagtgaatgggcacttcttgtcaatgtaggaaccctcaatagcggtctttggggtcttgaaacccaaaccagcgttcttataccatctcttagccctcttggtggtcttgatctttgggttgttgaagatgtgaggttgcttttggaaagctctttcagactgaacggtcaactcagtggacatctttacggttccttagttccaattctgctcaatctatcccttcaagatgaccaaattctaatccaaattatttactactaacgatggcgtaccacttcgaaaagttttggaaaattgattgtgtgtcggtttccctcggcccagagtctgcgtgcgtggggagggagagtccgagctccccccacgagcgaccgtctagtttttccgcctgggttccttgctaggcttaggcccctcctgcctaagcactccccggtttccacctaccgtccgcctagggtccctttaccaattcttcgcgtcgtggtaccaacgcagaaacatctcgaatattttcaagcaattttcaaaaatggtgtacggattctttttgccgaagacagtcacttgaaaaataagctcatcgcattttagaaccacataaaatatacatacacttgtacatacgtactcataaattcattaacttacctgtttagtcctttttttcattcttctgcatattatcgaatacagacttaccttgaagtagaacgtcaaatatgaaggtgtgaccaccgtttagcatcaacgttagcttgacacccttggaaaaatctaagtaacgctcaattataattttatcgccaatgtttcgacattgaattgatcttagtgggaaactaggtcgggtgtcaccagtttcatttgcaggctcagaatgcttgggtattacctgcaattctatgaattgctccaattggaataccaattcttccggacaatcttcaaaatctgtatacttcttatgcaattgcttctcgagaaactcctgtgagaacgcctgcaactcatcgtagaatttctcgatataattggaatcatctggtaactgcttgtattcgtgtcttggtattctgttaaatttaggtccctgattattgaaatgtgttgccgggggtactatgatcctgccagatacggtcttggataaaggtactctcgttgtcgataagaaacgcagaaacacttgtctaaacaacatggacgctggaaaagtgtggtggatgaaggtgttgatcgctattcgaattatgtaaatagtaggtcaaagtctatcaagcttattgagagggttttgaccttttagggctcttgttggttgtactttacaccccttttcgaataaggattcggagttattactttataagacaagggtagatcggattgaaggtcttgaggtataaggtcaaagaaggtagaagagtacagctctaagcttgagatgtgttaaggaggaggtattcttgagaatatgacagaatgaggaggcggcgtcaatgtcttaagttattctacgagatgccacacactcaacttgtacggttgaataatttgtaagcatcaatagtatgcgattgttttctgctaaacatatataaaaaggatacagttcgtttgagtcaggcaggattgataatatgcttagatcgacaatatcctcagtgttcaacaagagggcaacaatggcaaccacaactattccaaagacccaaaaagttattttgattaacgatactggtagttatgatgtgctgaaataccaggatcatccggtgcctagtattactgacaatgaattattggttaaaaacaagtacagtggtattaacttcatcgaatcttacttccggaaaggtatttatcccagtgaaaagccactgatcctaggtcgtgaatctagtggtacagttgttgctaagggtaattccgtaaaggattttgatattggtgataaggttgcttatctatctggatctgcctttgcccaatatactaaggttgatgctgctggtaaagtagttaaattaccaaaagatgccaatgatgaaacgttaaagttgtatgctgctggtttgttacaatctttaacagcactcacttttattgatgaagcttacaatgtcaagaaaggtgatttcatcttaaactatgcggctgcaggtggtgttggattaatcttagaccaattgctaaaggaaaggggtgctcatacgattgcagtagtttctacagaggagaaattggaattagccaagaagcatggtgctgaatacggaattatctccagtaaagaagatattgtcactagagttaaggaaattacaaacaatcaaggtgtggatgcagcatttgattctattggtaaggatacttttgaaactacaatttctgcactcaaaaggaagggtacttttgtatcttacggcaatgcttctgggcctgttagcccattccccttgactaagctgaccggaaacattaagattttgagaccgtcgctattctcctacatcgcaacaagtgaggaatggaaacattattctagggaatttgtttctctggtcagttctggtaaattaaagattaatattggccatgtgtttccgctaagtgagtatccaaaggcaacccagctcttggaagaaagaaagaccactggtaaactagtcttggagattcctcaatgattctaacggctgcatctgtttagtttgattttattttatgtttactttttttttttttgtgtcgcgcgacagcgccaggtttcaatgacgcttggttgacactaaataaattcaaagaaaatcaattatatttcttcgaaggatcaaggtgggctaacctactatcagaatacgagaccaacgagctaacgattattaattttaaggaaattttctagaaataagtcaatcaatcaattagctatggaaatatcgctagctcaagaaaattggtgctctgaagattgtagccaaaattcaatgtctaatggcgacaacgacaacgaaacaatatcttccggaagtgttggaactggcggtggtaaaagaaattccttaaaaaaatggcttcacaaagctgtattggggtatgatgtagatgatagctttgataatgaagatacggtagtaattgaagaagatgatgatttggtttttattcctactacctcagatttgtcgaatggattattttcctccaacaaggaattatcaccattactatttgagcaaaatcctgggcgtaagaattatcgtagacaaaagataaaagattttaaatttcatttaaagatgaggatgcgtttggctagaggtgatgaaaccgataaaaatggtgaaatgctctatagaagacaatgtttgatgggtcaagacggtggtggtgatagtggtgagtataatgaggaagagttagattgttatcaaatgttcaagacccaacctgaacacttagatgcacttttcgactatgcaatgaaaagttcattggagcaaacatcgccctcagactttgctgattttaactatgcttctagtccagttaaagaattgcagccattccaaaacttaaactacgatgatataaacttaaatgtggagcatgctgcatttgttccacttgatgtttgggatatagataaagaaagtgattcaaaacgtttagatagtgcagaagatccaagggtttgtggttctagcaatgatagtaaaggggaggaggattgcccgacattgtcgatggacagtacagaaatggaatccttcacgacaggtgaatcaactgaacgatcattggaattgacaccgtcagtttatctggctaacgaattgactatgaaagatggcgctacaggtagcgatgttgctaatgatagctttaattcgacagaaggggaagtagaggagacgtcttgtgaagattcccaagatactcaaaacactttatgcagctctggaagtcccagcattgactctgttttagattctggtgattccaatactataatttatacaattcctactttcaagcaaggacgtggccagctaaacgtatcgggtataatacaaagctttaaagatggcaccttgactgaaaaaaatttgactcaaatggccaagggaagctctttgggtctctctttccgtagtaaggagttctatgagcaaccgccctcgagtgatgaagatgagcaagcacaaggacgaaagcaggaaatgccaatggctccctctgaaaatgataatattagggaagctccagaaaattacggggttgagtttgctggaaatggtgaaggtgtaaaatttgacaaatattcgcacatcttagtctacagggcggttaagagaaatgtgcaagataaagggtttagttgtcctagtttgagaacgccgaacaatggaaacagttctataacatctggagtcagtgagtcaccatcggcctccaagccaattctcaagaagacagataatgaaagagaatctgaagagattgtgagagctacactctgtgataaagtagatgtgaagtcatttttagcttattttgaatattttgaacaccaaaagcattcagatgaggttaacctgagtaagtttagagaggagcagttaagccattattattcaaaggagtttttcccagaactattagaagatataaagtttaaacatgctttcaatagtgaatataggaaaagcaaaatggccacagaattaaatattggtcgaaagattggtgatggtgatgaacaacatgttcgtcgtttagtcaacgttatagaagatcctacaataggatccgccaattttaaataattatgaattctgcgatatatgaagtaaacgtataaattttaaatgatggaaacaggataaattattgttgaaaaatctctatgtttttgtctttattcttctttctttatataaactattgaatgagatacaaggcgattttaaataaaacttggagtttatttcttacccttgttagaagttgagttctttggtagttccttgatgaaaggcaagaattcaggttcacctggaatgtattttctcaagacttcagggaccactagaccgtcctcagtttggtagttttctaaaacacaacacaaggctctttgagttgcagctaaagtagagttcaaacagtgaacgtatttcttttctctgtcacccatcttcttgataccgcatctgatttccaagtttcttgattggtaatcggtacagttggagcaagaaaccaattctttgtattccttttggtatgggaaccaagcttctaagtcgaacttcttggctgcagcgttgttcaattcacctgaaacgataccaacgacacggtatggcaaattcaaaccttggtaaaattcttcagataatgaaatcattctgtcaaattcttcccaagatttttcaggttcagtcaaacagaactgttcaattttttcaaatgcatgaactctaaagataccccaagcatccttaccatgggcaccagcttccctacggaaacaagatgagtaaccagcgtaacgaactggtaattgttcttgaggtttttcaaaccattcaccactgtggtatgctgaaattggttgttcagaagttgcaatcaagtatttctcgtcatcaccatccattaccttgtacaattcttcgtcgaattgtgacaattgggcggtctttcccataacttctttattcatcataacaggtggttgtaatggagtgtatcccttagtggccaaaaaggacaaaccataattgatcaaggcttggttcaagaacacaccgttgtttctgaagaaataacctctgtgaccagaaattttaacaccacgttctggatcatatccatccaatctaagcaaaacttcgtgatgagacaattttgcaggtttaccagtagcagcagcaataggccccacttcttttaaatcttttggtccccaggtacgtaccaactcgttgttttcttcatcgttagaaaccacaacagatggatgaacgatgttaccaactacgttaaccttaaccttcaaatcgttatcttccttttgttccttttcagtaagttccttcttttcgttggtcaatttatccttttcagctagaagacctgaagcatcttccttgtttttaaattttagaccgatgtccttttgcaatttgttcaattgcttgtttaactcatctaattcaaatctagtcttgacccaattcttgtaatcagcgatgatctcatcaacaatttccacgctggcgcctcttgctttctgggactttctaataagttcaggattaccacctttctcctcaataaattgattcacatccaacatttctcactgaaatttgtcaagtagtctcaaaccttgctaaagacagatagatgtttctgatcagtggtttaagtcgcacacatacacgtcaacaaaccattacaagcttgccaaatatcagttcacgcttctgttagaatttgatgtctcgatgagaaaaatttttccaagctgaatatggtataagaggctgccattaggagtacataacaacaaggaacaggtccaatggtccagtggttcacgacgtcgcctttacacggcgaagatcccgagttcgaacctcggttggatcaaatcctagtttaattttttttttttcatctgctatttcagtcttatgtaattgattggagtgttcctcacaggtttaggtgtctattaattcaagtatacctggtccagacactaatttaaaatatagcatatccgccgtctcttgagcatttatactcaaaactagaataaatttgctttcctattttgctaaatcgcggattcgaacccgggtactcaatttgcgtctctatacaaactcatcatctcttcaacagtattcaagattgaaggtaaagacagttatttatcagatagatcctcagactgaaatgcatcctctcactattactgtttatgaccgtaatgtaaggcacatgctaagtgatgataatcaatcgagcagtcatcatacaccagacggtaattctcatgctatgttccctacaaatattaaatacgtctttgaagatgatgataccagtttagcaccaacagaatctgaaaatgatgatggtattgaaaatatgatcattgttaatttggaagagtcaggaactctaagcggtgtagaattgattagtgatcaattcgagatgttatcgtataagggggtgaccagtggtaatgatccaatggtagacgatgtggaactggaagtggtttctcaatttaccgatttatcgaatttagttcatgatctaccgctagatgaactgattagactttacgttatacagaatgaacaaatgcaaacgatttcaaattccatgtgaagggggacgggatagaaaagcatatcacgacaattctgaaaggtttgctggcatgggtttaattttgatcccatacattttttcagtagctttcaatttagatgaatcttcccttgtaatgaaattcacggcaacaccttttctaccaaatctaccacttctaccaatacgatggatatagttttccatgatttctggcatatcgtagttaatcaccagtgaaatctgttgcacatcaataccacgcgcccaaacgtctgtggatattaaaactctggaatgtccagttctgaaatcgttcatcactttatctctgtcctcctgcttcatgtcaccgtgcatggaaacgactgcaaaattggattggatcaactttttcgatagccaatctaccttcttcctggtattgcaaaatataacacattgagtaatggtcaatgaatcgtataaatcacataatgtatcaaacttccattcctctttactaacatccacgtaatactgtgagataccttctaaggaaatctcatctcttttaaccaaaatcttgacgggatcactcatgaattttttagtcacttctaaaatatctctactcatggtagcacttacgactaccacttggcatccaggcggcagacgagcaaaaatatcgtaaatttgctgcttgaaacccaaagtctcacttaataactcatcggcttcatctaataccaacacttgtacatttctagtttgaaccacttgtctttttattaaatctaatacacgtcccggagtaccgctgactacatggcaaccactactttgaattcttttcaagtcgtccttcaaggccttcccaccggttaatgcaaaggctttcacattaaggtaatcccccaaattggacaccacctggcaactctgagatgctaattctcttgtaggtgaaagaaccaaagcctgtaaatccttacgttttagttcgagcacttgtaacataccaatggtaaaagtcgcagtcttaccagtaccggattgtgcttgtgcaataacatccttaccagaaatgatctgcgtgatggctcgagattgaatagaagatggtgcttcaaatccatatgaatatatgcctcgaagaaggtcatccttcaagttcatagcctcaaaggtaggcgataccctgagcttcttagaagtcttgaatttcaacctgctatcatcttctctattgaatgacatcttgtccctgtgaatagcttgtcttagtctcttgtttctgtactcatctcatcgatttattagtagtcaaaacttttcaagcacttcttgatgatgataatgataaggcgctatattgaagaacagccatagcgactatcagaaatataagaacaccaagtgtcgaagaggaaatgagccctagcatccagcagattgtggtttccatcggtggaggacatgctactggtgtagttgagactggtgaagagatagagaggtccctcaagaaccttttcccttcaacaaatgttaaaataataaacctggataaactggatccaaataaacctagacagtacaattacaaggactacgattttgatcaagtttacaatgagatatgcggtgcaggccagaagcgatccagtatagtcgggaacgtagaaccacacatgcaagaccctgtagagattgtactgctatgtggatgctatgcactttatgataataggattaacgaaattgtgcaacttaagatttttctagatagcgatggtgacaagaggttgattaatctaattcatcagaatcatattaccactagagaacaattggctgaattactcgcggaatacttggatcatctgagattagaaatgcaaaagtacatcaaacctactagagcacaagcagatctaatcattcccagcaattttgacaccaccgctcgtgacattatagtcgatggtatatgtaaagtagttgaagcaataaaggggaaccaaagtccaccagctatttccaaaatttcaccattgctattggattttgaagcagaagcaatggacgttgagaaggaaaggtactatgatttatcatagcatgtatttatagttttgtgtaagaatgattttatgtgtgtgcaattgaagcggtgagcaacgatacaagaactaaatgttaaaatcaacatgcgtgaatcaaagtacaaatcgacgagatgcaaatgtgtccatgctatactacccagatgtctgaactgatctctacttaacactgggtccaaaaaacatattgcatggtacgagatgtcatcagggacatcatcgcattcaatctgtggtcttccaagagctgttactcaatgcaaatagaataaagtgagcaccaaagcgcagcttagaccagctacaaacaattattaagaattaaaatgtagtcctacgaaagttattcaactttcttttgtggttatagatctaattgaaccttagtttgacaaatttcatatgatgataacttatcggacactttgacatgaaaaacctttgttaagaaaggatggaaaaccgatgaatattgagataatattcgacttcaaatagcccgttggaaatgtttagacgatctatacacaaatcagtttgtcaatcaatacgtaccgtcaagactttgcatacaccaatctatgaaacggggcagttgtccaccaaacagtccctcatgcagggaatcaaattattggacaatgtagtcaattccactacttacaacaagacattgttgcaattgtccaaatataatacgaatcccaaattcatcacgtcaagagacagtatacggttgcagaatgtagtcagagagcttttggacggtttacgaatggatgaagtcatgacaggtagagaacgccaagatcatcaatcgaggttagctaaaattggactacaattattctgtgaaatccacgaaagcaacattttacctataagcactagtttaaccttgaccttaatggctgaatacgccaagagtccaaatgtgactactttgagggccatgctcgatggcttagaaaaagtacgaactttcttaacggagaacatcatccatatttcttctactgtggatatcgatgcattggtcgataaactgactattttaagagaagactctgaaacggttaaacaagtactgaaagcattggattacaaactttacagcgatgatttggtaagaatcgtcaaggggaggaaaaccaccgacgaaattgacgtttccaaaggctggaaattcccggccggtatattggacactaatgaagcctatttgagatcaatcgaattaccccagaagaagcttgtatctgtggatgacgaaatgctagtattgatttatgatggtactcttagagatgctaatgccgtgctacctacacttcaccatgcctccaaatctaaaaaatcgttacttttgatggttacaggtgattgtacaggtgatgcgttggcgtctatcgtcatcagtaacaacagaaacagacgccaaggtatcaagagtcaaactttcatcattaagtatgatactaaagccaacgacggcatctccttgcatgaaaattacgatttggtacagttcttgcgtctaccacaggggttcgcaagtgtctattctccagattacagtaccctagtcccaagtaagatgtgtgcgaaccaatactatgggaaattggattctttgaaagccactacaggtgaagcatttctctacaacccaatcgaatggtctggtgaagaacaggaaaacccatttactaaaatgaccgtcactgtgaatgtgggagctcagagtgagatagagatcgaccatagaagaaacttcctcgataatttaatcaacaatacgctgtgccatggtctttccaagggcttcatcccgggctataacgtggctctagctaaagctgtgccgcttttggagaagttggcttttactgcgcaagacgtggatactaagatgggctacgaggcggttatcatggccttggcacaatctttacaaaggtccttaaccaacgcatttggatacaataaattcacaagcacatcactgctagctgagaccatcaaggacccgaatttctccactgccgccatcgaacccatgggagacttacaggaactgtcaagatcgggcattttggacccatgggataaagtcgacaggtgtttggcaagcattgctagttttatgagaattttatccagcagcgacaaaatagtggctcaagtatttgaacctccaaagaagagacaaccatgaatatctaatccttgtatatacgtgacatatatggtttgaacccttaagcgcccttgttaatacttatctgactgacttctttttccgatctaaaagtgaccccttccccccgatctgacttcttgcagtagcgacatgactccgaatccttaagggtagagaatataaagatagctgagatgagatgaggtggcatcacaacatcgattgttcaattaaacgaccctcccctccaaaggatactgctgccatgattagatccgttaggtttaactccacacaagccggcctaaagaaaaccgctctgcatgatttacatgtagaactgggtggtaatatggtcccctttgctggatattccatgccggttgcctacaagggtcagtcgcatattgaatctcacaggtggaccagaacccatgcagggctattcgacgtctcccacatgctacagagtactcttcaaggtaaagatgccgtcaactttcttcacaaggtgacccccacggacttccaacaactacatcctggtgttggcactctatctgtccttttgaaccctaacggcgggatagtagatgacacattaatcaccaaacaaagcgcgcatgatttctacatggttacgaatgccgcctgcgccgaaagggattcacagtttctagtcgatgaattaaaatccgtagcagacgccaagtggaccccaatcacagacagatctctactggcattgcaaggtcccgatgcccacagggtcttgcagcatgtgttagcttgggaccagtcactggccgatctgtacttcgggcagagacgctcctacaaactcttcaacggggcctatatagacgtcgccaggtctggttacaccggcgaagacggattcgaagttagcattcctaacgaagatgccttacagtttgcccaatcgcttctcgataacgagatgaccaagccaattggattagccgctagagacagtctgcgtctagaggctggtttatgtctctacggccatgaactcgacgaatctatcacacccgtggaagccgctctcagctgggttatttccaaaagcagaaggaacatcaccgaaggtgtcaaattcaacggttacgacaaaattatagatcagatcaacaacaaaactcacaagagcctacgtgtgggctacagataccagaccaaaggccccgctgccagaactggttccaagattttcctcccagacggaaagactgaagtgggccatgtaacttcgggtagcgcttcgcccagtctagataacataaacatcggccaaggttacgtgctaaagcctcacaacaagagaggaaccaaccttttggtacaggtaagaaacaagttattgcccattgagctggtgaagatgccttttgttccttccaactactatagaggataaggcgcatgtgggacaccgttgctcggcggctgattttcagaaccctcatcctccggagttgttcggtgctaccggactcccgacatctttaaacgcgagtttctccggtaactagcgataaattttgagataccggacccgtctcgatgcactatagagaaaaatatgacaatcaggcaataatgtatacaagtcagaagataattaattaagcatataaatcataagataataaaaattcataaatcagaagataatgagcaagagtcttgcccctagcaagtcctataaaagaattcagctaatttagctgttacttgggcgaacgaagccagattctatgggtgatatttctttttctaagcgatctcctgtggcttttcgcttgtcgtttaatcgaataccatttgagtcatcggtacatatttaagccctcatttgcacgaaatctgaactgcaatacataccgcatagaacgccataacatggtagatcctactaatactactgctaaagatggcggtagtgtatactcgtataattcctattcagactccgacctttcccctgggaaaaaagacgaggaagggggattccaagatccacaagcgtacagaggaccacatggagaaccaacggcttctgacggagctgaatccaccggtgaaggttttcatgaaggtgatgtaaaggcagagtcagaacaagatgagaataagaaagtcggcgtttggaagaaactgaaggacagaagttactggactcctcgaaaggaacgtagaggtatcctaccacatctctcgttgataccagagttcaaagatgcaagagattacccgccgcatatcaagaagttcatcgtgtttgtcattgcattctcatcaatgatgggacccatggcaacgtctattgtctatcctgccattgatcccatcaaagaagattacaagactacttcgatcatggtcaacgtatcagtcggtgtttaccagatcagcttaggtgttttcccactatggtggtcttctatatctgaaatgaacgggaggaggacggtctatgtcctttcatttcttcttttactagcattcaacgtggggaccggtttgtcgcccaacattaacgattttatcattttaagagttttatctggtggtgctgctgcatcagtgcagtctgtgggagcggggactgttgctgatttgtacgttccagaggaaagaggtacaaacatcggtatttactatatgggtccgctaatggcaccattagtctcccccatcatcggtgctgcgttggtctcgggctttccatggaaatccacgcagtggtttatggtgattctgtctggtgtcaatgtcatcctgctggtacttttcctaccagaaacgcttcgtaaacaggacagcggcgctgcaataacggctattctacaggctcgtaggaaaggttcgcccggtgttaatgcgaatcagacagaggacaagagcggataccaaactcaatataacgaagatacgcacagcattagtgatccttcaatagcaactcatgaacacggtaatgatgctgatttagaaagggtattgagtcggaccagtaacagcatgacccgattcaacagtaataatgacctggatccaattgcaccacaactttcaaagatccactcctatgatccgcgacaagaacagatgttgagagagtacgaggcaaagagggtggaaaacaacttagaggaggaactgtcccgtatggaaaccgctaaatccaaccataccgctcggagcgatggtgataaaatcgaacaaacgagatttcaaaagtatcgtcacctggcatatttgtatttgataagacctctcaaatcgttatactttttggagtacccacctgtccttttggccattacgttttcggcaatttcattcgccgtcttatattttgtcaatatgactttagaatacggctattctcgtcctccctacaatttttcaccaatgcttataggtctgatgtacattcccaattccgtcacatatctgttagcatccgtctttggcggtatgtggacagataatctgctgttaaagtacaaggctaaacatggggaaatggtaccggaggccagaatttcgtggaacatcgttactgcagtcatagctttccccatatccttactaatttttggttggtgtcttgataaaggtgaacattgggaaactccgctcgtgggtacagctctctttggttatgccaacatgatgactattggcgctacagtatcatatctggtcgattctctcccgggcaaaggtgctaccggtgtggctctcaacaatctagttagacaagtgctggcagcagcagcagtgttcgtgacagaccccatgctggacaatatgaccattggttggtccttcactatgttggcattcatcattatcggtgcgacgagcgtgctggtcgttctgaaaaaatacggtgaccactggagggaaaatttcgacttggaacgtttgtataataaattggaatgagatgacttatgtttggcatttaggaatttgtttcttacagattcaatttatagacttttaaagatagactattagggcttatgtttgtacgaatgggcatcggaccattatccttccgagcccaacatgtggaactcacgatccaacttttcaaaatgatacttaacaccagagtaaggctggcataggactttagttagctttgtttaactagccttagatcctggaactggcttctcataagggaaagatgtcgttatccagtggactaaacaacgggttgcggaaatgcaagattatggtcagagtaatcattgctctggtgatattcgttcaggcaagtctctgtattacctctatgcaagttatagttcgagtcgtctaccataacaacgttgctaaacgtcaccatggtattgatttcactaagaaggcatttatctcaatgctaatatccactttacatctaattgcaccatcagcagtcagagtcacgacagataataattcaatccccaagggaactttctacaaggatttgaaaaatggcagaattgcatctcatttgaaacgcaaatctgtcattgtagcaaatcatcaaatctatacggattgggtgttcctatggtggctaacctcgacagccgacctagctggtaaagtttacatcatattgaagaaatctttggagtatatccccatcttgggatttggtatgaggaattataagtttatctttatgtgcaggaaatgggaacaagatcgtttgaccctgcacaattctctgggggttattgatgctaattcaagaggtgttggccccatttctggtagatccccagtcagagaggatgccgatggagagatcttttgggatacaacaagtacaaatgcacgccaagaaagttggccttactgcttgattcttttccccgaaggtactaacttgagtcccataaccagacaaagatcctttaactatgcaaataagattggtaagacaccttttgaaaatgttttattgccacacgccactggtgcaagacattccctattgaaactaagaccaagcttggatgtagtttatgacattactattggctactctggtgttaagaagggggaatatggtgaagctctttacacgttgaataatgtcgtttttaagggtgaaagtccaaaattggtagatatgcatatcaaggcataccatataaatgaaattccaattgatgatgaacaacaattttcggattggctttacgacctttgggctgaaaaggatagattgatgaatgtttattatgaaaagggcacatttgacttggaccctgatccagatcatacaattactggcgaatttaaaatctctgcctacccattcttttcctgtgtggtcttcatcaattccctcgtatgcttaccatttttaatctggtacctcttgcgctaactaatgccaaattttgagacgcacaatacatttgagcactacataacatgactatatatccctactgtccacttctttatattttatttgtaaatggacgacaaagcagttcagagttttgctttttgtgatttaatggctgaccaatcttcatcagtcaattgcttatattctttgtaatcctttaaccagtagaccgtttcatctccattagcaccatgaggtagaacctggttcctataaatcttcttcgagattttattagtgtccgtcatctcaatgtgatccactaatttgacaaacaccgggtgtgcgtatttgggcaattcacgattcaaatgggttaacatccgattcaagaccgcaattctaccgctttcaggtgtttctggatttttcaatttgatagtagcaaatccggctctaccttcataaccaggtactttaataccaacaaccactacctgtgcgaaatcatcatgattactacccattatttggtcttccacttcggtggtagacacattttcagacttccacctaaatgtatctcccattctgtccacaaaataccataacccatattcatccgatttcaaaaggtcaccggttctaaaccaagcatcaccttctctaaaaacgttacgaagcaccttggattcagtttcttttttgttacccacataaccttgaaatgaagtctcaggtttctttggataaaaaattctcatcaacatttcacctgattcaccaactgctggtttctcacacaatcccttagaatttctgtagatagtagcatcatcatcggggtccattctaaccagggtctgttgtaaacttaggaaccattgaataccggtaccataattcctacaagctcctacaccaaattcacccttttggtaagaggtagttgccaaaggcgcttcagtagctgcataaaattcaccaataacctcaatatggaatctgtgtctaaatttttgccagatatcaggtctcaacccattaccataagcgactttgacagagtgcatattttcatatttggagactggtgtgttaagcaaatatctacaaatttcccccacgtattgacaatgagtagccttggtcaaatatgcttctttccaaaaattgcttgcagaaaacttgttagagattgccacacaaccacctttagaccaaacggaacaaacaccaagtaacgtagcggtagagtggaataagggcatagcagtgaaaacaacactgttattatccatgtgctcaatgtgagcaaataaggtacaaccaacggtagcttttctccacgacatgatagcagacttgggtaaacctgtggtaccagaagtataaatgaacatggcaggcttgtaatcggtaagaccctgtggggatctcaaatcatcttcttgtaaaaatttgggtgtctctggatcttttagagtttttaaaagctcggtctcatccaaataatttaatctgacatttggcagttcttctttgatctctttttcagatgatttgatgggtccactagcttgtgggtcgacaaagacttgtgtaataccagagatccttagtgaatgcactagaggattacccagtgtattgtaattcaataatgcaggtatagcaccaatattccaagatgctaatagtaaaaacagaaacagtggcttattagtagaatcaatagcaatgttatcaccggaacgtacaccatattgttcagacaaaatgtgtgatagtcttaaaactatatcataagtctccctataagtaaacgattccacttcaaattctccctttttcgacaatggtcttgggtaactaatagccaaacgatcagcattttgttccacttgtttactaaatagataccagtactgaaacctatgatttctgacagccagaaaatattgtgccacactcttgatgaaaaacgttataatgtaaaaatcttctttaactctatgttttctatccaagtattcgattggaccctttaaacatagcgatagaattgcaaatactggcaccaaagccgtctttacaatactaaacacaatgagccatgcattcagcaggacgtgtcctactggattcttagttcccatcgttaacagttggagaaagtgctttacaatgatttctgttgatggttagtgtgtgtatatcttctacaaaaatctcctttagatcttacaatcgtctgacgtgaacgacagcgtcagtgtgtcgctggtagaaaataaaataaaataaaaaaataaaaaataaaatatttttaaaaatgtggacagttgattaaactttgtagttcaatgtcgaggaatcagaaagatccccaggattatggaaaggtggttggttgttattggtattattgattttgtcgatttcttcacttagatttttcctatccctcaagtacagaaaccataatattcctaattgtgctaacaaaaatgcgaacgagacccacgacattgcagccgcctttatacctctgtggattttcaatatgcccatgcttgcactgggaacgagcttggaacaagcatgaatacccacatgggtccacatcgcgccaatcccccagaataaaaccaaaaaagctgatacacacaaagtagcacgtaatacccaatatttaaacggcagagcgggaatcgtactgtatattaacatgagaaacatgagcgttgccaaaattaccgtgaccattaaaatgtatggatgcaccacatatctagaagtggtctcagccaattctaaaatgttcaagttaatgggcaattgcttctgagtactcttcttatcagaggaaggaacattaaacaattcaatggataaatcgttataaagtggattgtttgccagatcttttcttgggtaacatacagacttcacgcctttatcgtagtccttcggaatattcgttatacaaacgcccatgtatccggatgcaatactgacctgctccaagcccgacatttgtgtagtaccattagattggttaaacgatttttgaattacattgtaaaatggtgaacttctatcaaatttataacggactaagaaagtcgaatcattggataaattggaacatcccatgagtagaaaaactgtgagaaaaattgtaattaaattaagcaccagggaaattaccttgggcatacgcttgaggaagaaccaagccattttccaatataatatcataataatttttcttgttttttttcttccctctagtgacagtgtgacgccgagatttgagatactacagaaaactgagaatgtctatccattcatcgttggaattatatacgccataagttcaatttcatcgctgtgccagcatcgtcttagttcaagattagccgattgggtcccttatgatctgaccaatttcctacaatcctgaaacgcatgagatcaatgttgtttcattcgtatctacctaaatcttgcgtactatatttgaatataatagatgaatataataatttctgttttgttaatggcatcagtccaaagaagaagcaccagtaatgatatcaaccaattcgttggtgataactgcttgtctggttctgttgtacaagatggagtatctgttaatcatgtcacctgcattctttgaggcgttgtccatagcatttcttcttgctgaaatttcagcagcgtaaccttcagccaaggctgccaaaattttgttggacaaagtgtattcgaaaagatcttgagaaacttggccatcattgtcaatttcaaatttactgaaagatggagaactttcgatggtttcagggttgaaaacgtcctttgtagaaggttcaaaagacaatgaagaaactgggttgttgaagaaaatggtaatctttggatagttttgagcacctaatcccaatagagtatcagcaatagctgacgatagttggaaagttggagcttccttaccaataccattgataccaattttaacgttatctggatgagttctcattagttgagttctcattttatcaccaacagctgcaacagcagcgtttggtgagtctgctagatgctgtctgactctcttggccaatgcagagtgaattgaaccacacaaacctttatcggaagagactgcaacgactaattctttatccttagcagcagtttcagcatcttctattggttttgtctcggcgttgttgtagaaggcggaatctgcctcatcaaatttcttagcagtgaccttagccttttcagctctactcaatctagtggaagccacaatcttcatagttttggtaatcttttcaatatttttaatggacttcaaacgggtttccacttcctttaaagtagcatagttccttgcttgtggtacacgaggcaccatagcaccacaacggactgcattgacaccaactctagacaacatggtcactttattgaatcaatcgtttttcttctttttccttatattttaacgtatacctctagtacatctctttagagcaccttttcttcactcccaaagttttgtcgaaaaacggcttcgtggtccgtgatgacgcgattggcggaacgctattggccaaacaagatcgagaccaaaaagagctgaaatgggctaatagaagctggtaaaaatatgggcattcatatctgcctgaacttattgaaccaggacatctcttttaattaattttaattaatttatgtacatgcgactaccatgctgagattcgaacccaagactttttgatcatgaaaccaagattaaacaatggccgggcaactattgtttcagggagaaaacggaccagtcagattcaagtgaaagagaagaaaagaagaaaaaaaaatctgcggctacaatgcaaggaagctaagatcgtggcgatgcaatataatacatgctactataatacagtaatattacagcgatcgttcgtgctaatctaattctttagatttacaccgtgctaaacaatttcaagaacccttagtatcttcctaataatcttgctaccacgctttcccttgttattataatatcctcttggtttaataaagcacatcatagatatcaaaaaggtaaaaacaccgattggaacataaaaagtataagagaaaaaaaaatttataaggcaaaaccatttggtgtatgaaagacaagactgatatcaaagtcaacgccgccaaggtcctttatacgatattataagatataatatcgcctcatacttcttttttttatctgtcgctttactacgttttctaacaaaatagtatttttaagttcattatctttactacagctgctaatactgccagatttcgtaacatcgcactcacatagctaatagtttgacgatacgtcttccaatctcttacaaacaacaacaacaaaaacaacaactagcataaacaaaatacgcaacattacgctgcgctaagagaaggtttttattatcgttgtttatgtacgttttctgttgatcatgaacattggagatgaaagaaccagtggtgattgcaaatttataaaagatgaacaagaacatagacaagaacaagaacaagaacacgaacaagagcaagagcatgaacatgacagggaaggagagcaagaggaggataatgaacccgttacttctttgaaagatctaaatatatcagacaagaagaagctatcatcaaacgttatacgcgggagaaaggcaagtacttatttgagaatattcagagatgacgaagggttaacggataacaatatacatagacaaatcatcaagcaacaagagctgaatgcaagacaagaaccgcaaccagtgccacagaagccacaacaggaggtagttgtacatcctcagcaagataagaaaacaaagaaaccaacatctttctatgatactaattacaagttttccattaagcctgaagggaaatcttcgagatctcaaaatcctctagcgtcgaagccttatgcagtagcgaaatatttggaatctgcaatttctgaaccgaataaacaacagcagcaacagatgcaacaaaccgatttgggtttaaaaccagtttcatcggctacatattatccgcataaatcgaggggttctacgcggtcaataagtgatgaagagcctggcgaggggactgcgatcccagttgtcccaagatttcaatataaaggtacgtcggttgctgagaccgaagcgacaacactagcatcgattacacacgaccatgtggcgcaatcaccggatggacgagcttcaggttcaatttcagaagcagctgtggaaagtgatgaagattactacgatgataatgaggaagatgaagaagagaaagatagtgtttatcctttagccgttgaactacagccttttaccaataacgttggcggtcacactgcgatcttccgtttttcaaaacgcgctgtttgcaaggctttagtcaatagagagaatcgatggtatgaaaatattgaagttaatcataaagaattgttacaattcatgcctcgttacattggcgtgttaaacgttagacagcatttccataacaaagaagattttttgagagaattatcatcttcgcaaaggcataaacaagagcatagggcatttccatcatcacggtgtattaaactgtaccaacaacaacggcagcaactggagaatcaagaccagcagcatcaacatcagcattatgatcaacatcagcaacagcagcagcagcaacgaggacaatacctgccacaatttcaacaaaataattgctcaagaagcatttcttgtaatagtagcagtgaaatgggtgggttacctgaagtggttcttagcgataatagacacatggtgccggattccatgttaagcatgtatccatccaacttatgcaattcctcaggaacaggttcttttctacagtcaacaggcggatcgtctggtaaagaatcatcgggttccactacggtaaataccaaattgaaagaattagtactacaggaggtatttgcgctttcaccaggagagcatgatataatagaaggtcatttgaaaaaggtaagaagaccatcatcaataaagaaaagtcgttcaagttctcaagattcttcgtcacaatcaacctcaagaagaggctctaattattctttgaaaaatgttccaaatcaaggttcaggttctcctcttttgaagaaatcaattagagagaccatttctcactctttgaatagtccaagttcaatgatggatttgagacaatttcagaagaaggaactggtcagggaaaaatcacaactaagaagggcaagcttgtcatcttcaaaagatgagaacaatcctacgatctcgccattatcactaccgagagaccatccattagtggaggagtttgcagtggaaaatgaggatgatacaaacttcagccttgatggtaaagaaaatcatactaatactatcagtactactaatagtgacattactaataatactagtagtgccggtagtactagcaatactagtcatctcgcaaaaccaagtcaaggtaagcataacgaatcaattacttttgaagaacattccgatactgttgtatcaaaatttatattattggaagatttaacaagaaaattgaataaaccttgtgctctcgatctaaagatgggaacaagacaatacggtgtagacgctaaaccatccaaacaacattcacaacgtaagaaatgtttaaagacaacttctaaaaaattaggagttcgtatctgtggtctaaagatttggaatcaaacttattacatcacaagagataaatatttcggtagaagagtacaggctggttggcaatttacaagagtcttagcgagattcatctacgacggtcttcatatttcaagtgtcgttagacaaatccccaggttgaccaaacaattagataccttaggttcagaaattgcccatttaaaaggttacagattatacggatcatcacttcttttaatgtttgatggcaatgattcaggtaacaaaagatgtagggttaaagtgaatctgatcgattttgcccgttgtgtgacaaaagaggacttaaaggaaagttacgatttattccgtataccaccaaagaatcctgatgttgaggatcgtggatttttaagaggggttcgtagtttgaaattttacctgatgctaatttggaactatttgactaacgacgctccactttgtaacgatgatgaagagttacaaacatttttacaagagaacgttgaaaaattcgacaaaccatgggattggttggatgagtttgatgaagaagatgaagaagaatttaatagtccaaccagtccattgaggaaaaaatggagaaaatacgaattaatcttcaacacggaaccaagattcactaacgatggagagatgagcgattaaggcaaccgacccttccccctttgtaataataaatatccaagtaatggcagtaatgaaaaaaaagatcaaaatagtaaaataaatacgatgatattatgtgtgtgtgaacaacagtaatgccaggtgaaacggaatgggttcgcccgactgaacttaagtcgttcaagccaatcttccagcttagagagaccgtcccaatgttggcgaaattgggacagccaatgatactggttgttgttatttatttttcttctttgtaaaccaaaagtgagattaacaggtgatggaagcgataaatatttcatcaacttgcatctttttattatggataaaatatgcgggtaacccaatgaattgttgatgaaaaggaaattccatcacggctttaaaacaagggctcaggctcaggcactggtttatacttcaacgatacatgcaaacagggctaggcggtctggttgtagaaagtcatgaataatgatacttcagctagggataaagaggaaaatgtacctgtaccaacactgagtgctgctgacaagtatttcatcgagcaacgtgatctagttttacaagatatcaacaacacgatggattcgattttgaataatctcaattctttgaacatctcgctagagaattccatcgctgttggtaaagaatttgagtcagtagctgaattgtggaaaacattttataacggtttagaaggtacagaaactgtatcgtcatcacaagacgatgaattagaaaaataatcattgtaaagatgaggctccgttaattttcctccttgggtgtaaactgggtactttcttcgataatccaactttaatccttaccttattagaatcaacgtcgtaagcctctttgttggccttaaagataagatcctttaatggtttgtgaacgttttcaggtggtaaagaatcgttaacagatgtactcaaggtatccgtgtatgatccatcctccaaatcgccttcgtattcagaagatgaagatggtggatctcccaaagtactattattgctatggaaagaagattcacaatttgcttgtacctctgtattctgtgaggaagagttattggcttcctcttgctctgttcccgaacttccaggcagagcagtgtactttattcctgcaaattcctcatcttctcgattactgaaatattgtgctggctcgtaagacgcttcttcaacatccgatttggcctcaaccaattccaatccacccaatctttcttcaacgtgtgaaaggggtgataccgccgatgttgtggaagctctcttgagacctgctgtgtgagctgctggctgatacgtagtaacacttctcctcatcactggagtttctgctgctttatttccctttctatttgaagtagtaactaggagaaaaagtgaataaaggaggttctaaatatgcttttatactcagcggctaatccgtgatcatttaatacgtggatttttttttctggggctataaaaggaggagcgaggtttggaaacgcgttacactcttccctctcttaccttcagaaacacaccaaacaaataagtcattgtgtgattgtgatgagcccatcattacagtcgtaggtctggtaagtggcagatgctcattttcgaaagaatggcatgagatgccaacggatcgaagtgagtctcgtctgccgctgagaacccatacctcgtaccacaacacccatactgcaatcgggaactgccctcgaccggtttgggcaagatacatagtgtatcacaacgatggtagccttggatttgagctaggtttgcaaaatggatgaagtacatgcttctcagaacgccaaaagggcccgaacgaatgtctggctcatggataatccgttggttacgatcagttgttataagatttttgcccattccttaatttgtttccaatacgtaaatgggcctcttttcagtgaattttctctcccatcatgagcaaaattcatttaccagatggtctcaaaggccatggactacattggcttgtttgatgaactgagctggcttattagggtatccgtattggcttttggggcagtcttccaagtacgtttgccaaatctgccagctagttatcactatcactttttggaaactgatcaccccttcattatcatctattgatgagaagttggaattgaaaaaagacgtggtaaaacgccttaaattcgtcgtcatcacctatcacttgaccatactcaaagttaaccgtatcgtgatgtctgcttccccattctttttttttccttttctttcttttctttctttatctttgttcgttaacgagttcctttccctgttcatcaccccagagtttaaaccgtgacttttataaacatcttgttgtaataaaagaaagatgagcattggacttttaaggcaattcgtttcaagaatatcttgctcgttacccaaataccgtccatttattaaaactatggctgacgacattgaaagaactcaaacccctattatctttgcgcctgaaacttatcaatacgacaagtcttcacttaacgaatcgcaactggtcaaagatccaatagaacagttcactagatggttcgaagaagccaagagtgataaatcagaaaccctgccagaagccattaccttttcgtctgctgagttaccaagtggtagagtctcatcaagggtgttacttttcaaagaactagatcatcgtggattcgttatatactctaactggggaacttccaagaaagctcgagacatccaatccaacccccatggtgcgatcaatttcttttggaaagatttacaaagacaagtcagggtggaaggttttacagaacatgttaaccgtgaaacttcggaaagatattttaaggtaagaccccgtggatcaaagattggtgcctggtcttcaccacaatcatctaccatcaagagtagagatgaactagatcaattgaccgctgctaacactaaaaaattcgaaggtcaggaagaaattccatgcccggactactggggtggagtgagagtggttcccctcgaaattgaattttggcaaggtagaccaagtcgattacacgaccgtttcacctataggaggaaaagtgaacatgaagaatgggaaatcattagactagcaccatgaaatttagacatttagagaaatttaaagagtttataatttatctgtgacgtatttgatcttatctgagatacttccattataatgctgggattcctgggcaaaaagctctaaatgtgaaattaaacctgttttcactttagtcggcaaccttttgtttaacaaaacagtcatataggcaaaattcaaataaaacatgttaagcaaaaacgagtcgtcgtcattggactctaatttatggaagaaagtttgtgcctgtagccataatgcattttctaagtgtgatattccactttcaccactaataacgttcaaacatagaccaagatggagaataagaatatctgtagatcctaatggcggcaaatgatcaagaacaaacttcatacaggtatgaaaaacttcgctattcctttccaaagtttcttcattagtgaataaaatcaatgatttgattagatggtcatcttggcaattattcggtagcagatctattaatttgttggaaacaactgacaacagattagcatcttcagcagtatttccactagaggctaatttctctactacagggaaaattccacgtggcaaagcctcacttgccacaagagtttgtacgatccgattaaccagcggagcacacgaaagtattaccccaggatattgaacgcacagttccaacacatactcctgacccgttctatcttgagtattatgcaaaaaatcgttgtaattcaattgtgcaatcttgttaccagataacccattaataggtaatcgattccgtttgtaaagtgcctgtataaattcattgaagaatttcggcagttcgtttggcggcagttggaatttagtcgcaagaaacccctgtattaacaacaagacatcatcatgaaaatccatttggtggaaagttcttctccacatgtctcgtgcttgtcgtttgttcacatagcggcaaaactcttgatcaccgttcattgctaatgcaatatttaaaagatgcgaaacgaactgagaccgtgacattcgtgacggtgtcccttctaataacaattctaagtcatcttggtactgtaacatatcccccatatttttcaattcgttgatgtgatatgtttgactatcgtctccatccttcgtatcaccatcttcggtcggttttggctcctcatcttctgcttccaaaccttcttcttcatctttgctcattagcatagttcgagaacgatcgtaggtcaatttcccagaagtgttcttcgaggtaccatcctctactgacttttccaactctttcttaaacgtatcttgtaatagcgtctcatcactactcttcaaagaggatacaaatgtgtttaggtcattaattgtcctgtttaaggggttttcgtctacattagtgtctttcttgtcctgcgtatcatctgagtgatcctcgtggtaaatccttcttctcttcttaggtgcctgagccttatccaggaagtcaaaagccttcaaattggacacattcgaacctacacttgaaactaaacttgaatccacacttggattcatttttgaatcacttgtcatagggcgaatgtcatctgtagagttatcaatcacagtttcacgttcgttactctccaatatgggttctggttcggactcatagtcacttaattccacctcagatgaattattctgactggcataaatccctaatgatccactacgcttgccatagaccttcattagcaggccattaccatcgatcttattacgcgactgttcaatatggaacgcggtaatgttttaaagagatgttcatctcatctcaaacttagcttttaatttgaaaccggtcaaagaagtgaaaagtgagagtaatagagatttaactgatgtatggtgatttagctaataagcttgtattggaggctaagagaacaaaacaattgaatggtagaaacaaccagcggtacgcactacccatgtaccacgaagaacttgtacaaggaatattgagagaagtaacgcagctgaagaggaactcagagtttttaaaagatcagcaacaactggctctcgttgatgacaagatttctaaatgccagtattttgttactttgctctgcatggagagaaacaagagatgtctcttggcatatcagaaagtcaggtccgatatcttaaactctttggcctgggaaaataatgggttagatataatgaacggtctcataggagcagaacaagacaccagtgatttatcccatcaagaacaagactatttgaaagagtatactgatcttttaacggaattaaaaagtggtgatttagcagatatcgacctttcaggcagtctaacaccgccaagtgatgtgttcatcgacgtgagagtgcttaaagatgcaggagagattcaaacggagtacggtgcattcaacttgattaaagattctcaatttttcgttagacagtcggatgtggaaagactgattcagcaagggtacctacaaaagatttagatgcagatgaagaaaccgaatactggctacaattatacttgcctcccaagctctggcggctcacaatggcttctcatcgactttagcatgtgcggtgtatggttgcgatgatcttggacaaagttaaagttcagacgaaaaaaaagtaatcttgaaaaaggccgatgggcatcgtgaaattttttacccataaaacaaaatattgaacactaagtcgagacattgaagaaatttcaagtagttgaatactcctattagttgaactaccaaagatatttcactctccagcagtcatggaatcagctacacagaagagcgccttgactcaaagcgagcagcactatttcaattcttacgatcattatggtattcatgaggagatgcttcaagattctgtaagaaccttatcctatagaaatgccattgctcagaacaaggatttattcaaggataaggttgttctagatgtcggttgcgggacaggtattttatcgatgttcgctgctaaatacggtgctaaacatgttattggtgtcgatatgtcgagtattattgaaatggctcaacagctcgtcgatttgaatgggtatggtgacaagatcactcttctacgtggtaaattggaggatgttcaattacctttccccaaagtggatatcattgtctctgagtggatgggatactttttactctatgaatccatgttagataccgttctttatgcaagagatcatttcttagttgaaggtggattgattctcccagataaatgttctttacacattgcaggtttagaagattttcaatacaaggatgagaaattgagctattggcaggatgtttatggatttgatttttcaccattcataccacacgttatgaaggaaccaattgtagacacggtggaaagtcaagttgtcaacacgacaaagtgtgagttaatcgaattcgacttaaacactgttcaattgtcggacctttcattcactgctaaatttgaagtacaagctaaaagacgagattggattaatggtataattacttggttcgacgttaagttccctgcaccaccaggtgaaaagccggtcaccttttctactggtgcacatgcaccatatacgcattggaaacaatctgttttctataccgccgatgatttagaatgtgaagaaggtgacattttgaagggtcaaataatatgccaaccaaacaaattccataagagagatttggacatcaagctcacttacgatttccaggcaaagggtgtggatggtgaccgtagatgtaagaaaaacacaaactactatataatgcactagaacttttctgttttctttttttgaacttcgttctaatgttctgtaaattaaattagtatagtaagtactaaactaaaaggaataatcgattagggcatataaaaataaaaaattctatatactagattattcagtttagtcgtgcttcaaagtttcgttgaaaagctgagatggcttaacagaagcctttggagccttcttagagcccaacttttcgttagcgaaaaccttagcgtatgggttcaatctcatcaagatttgcttgtttctcaatgggttcttcttcaagacatgagtacgcttttggttagcttggccagctggtctaacaacagattggatttcagaagagttgatgattctggtaacatcagtggtggagatgatgttagatggcaagctgtaaccagacttggcagaagcaacagcttcagaaccccagaccttgtccaacttggagaaggcaccttcggtccagataacgaatctacccaagtgagcacctggagccaattgcaacaagttcaaagcagtaacgtcacaagtttcaacacctggaacgtttctgaaagccttgaccaaaccgttgtcttgggcgtagacaaccaatggacctcttctttgagtccatcttctgtttctgtatttacccttaccggctctcaatttcttggatctgacaaccttaaccaagtcggcaccagcacccaaagacttcaaagcagacacagcttccttggttctagtgatagattccaagtcgttggaaacaaccaaaggaatttctgggatcttttcaactctgtgacctctagccaagacaagagaagcgacaccagaagcagcaatagcagaggcagtagcgtaacgcttttcgttttggttaaccttaacgttccatcttctccaggtcttggttggagcaaacatacgaccaccacgacacatgttaccgaaagcaccctgaccggcggcgtgggtaccaccacctgcaactcttggaatacgggcaacagcacgaccagtaccccatgattcagcagagtgttgcataccggcttgtggggagacagagtaagcttgtctcttgttcttgttcacagaggtgaaaacagagtgaacaatgtcagcacggattggtgctgcgaagacagctggcaatgggacagctgaagaagtagctttaccttctagagattgaacggaaacttgaggacgagccatggtaatctaatatgtttgtgctttgtggatttttctacaaaatttgaagaaagatgtgatgagatgagttcaagaatgaaaaatttttcaaagcccttttatacttcaaaaatttctgcgtggtgaaaaaaaagaagatcgaggacttgaaaaaaaggcaaaatatttaccgatgaacaatgaaaataaacaactttatatgcagattgtgatcaattaaagtccaaaagggcgtttctacaaacctttatgtacttcacaagtttgaattcagataatgctcagctttttccagaattttacgctcagattcgagcatgatacgggcagctgcgttattgatctgtggtactggtctttttctcttatgcaccagattcagtagaattttacgtgctcccttgctgagtggcttgtctagcaaaccaatcttgtctcccgtagactcgacatcttgctctatggagcgtaatttgttccagtctctgtcgttgaatgctaatagattgagcagagctctcatgggggacgaaggttcaccattgcagtctatacacattacggttagccagtacggctcgtcgtcctcctcgtcattctcgtcgtcttcctcctcttcatcgtggtcttcttcttcttcttccttgtcttcttcttcctgctcatcctgctctttgtttagcgcacaccacttgttgtacagcggataacccaaatgtttccaccatctagcccttaaggccagacgcttgtcttttaataattttaagaggtccctgcctaaatatgcaacgtcccaggggttattttcaacacagaacccgtatctggctaatagtaaggcgttagaatagtctccgtaagaattgaatatctcttgacctttaggaacactttgcgtaaggacgatgtcgacgcaatcatcaggctgaacaccctctactagccccttctccttaggattggtaacttcttcctcttcttgcgattccagctccttgatcaactgcatgtctatcagcccatcaccgctttttgaaggcggtttcttttcacgttcttgctcctgctcttgttcctcttcaagtgcctctgccaccaaatgcctgcacatcccaggctcaccacactcgctgcaaacatcatagagggaaacgaatctaacgtccggggtcgatacgtggtgattgaacagatccgctatgggtaccaatccgctctcgtgataattatcaatttcaaagaccctcgaagagatggcatatgcacatgcaacgaatttctctaaattatcgagatacttccatggaattggaataccgacttctttattccatctatgggccaattccaaagcaatttggaacccttgttgtatatcaggttcagggtccaatccctggtaaagcgtatcgagtgtaaaccccttcagcatatcacggtccggccaatagttgggcggcagatacaatgatccagcttcttcaattttgacactcttcaagtacggccaccagtggctcctctcttggaatacggtcgtctcatacacaaaggcaatggtaagcgctagcataccatccaattcgctatccactagcaaattggaaatggaactgttcgatgcagaaaaaacagcactcttgggcaactgcaaaagggtctcaccttcatttaaatcacattgcgcaaatacacctaacccaccgactggtgaacgtttcaccagacattttgagccagggaaaaagcctttacagtcctctacgaaccctaaaacaccagggagatcttctgaaatggtagaagccatctcctatgatccttttttttctattgtaaccatctcatctcatctcatctcatctcatctcatctcatcgatttttttcatttttgaaatttaccaaatcaatgccccatatgataattgacacaaatgaaagtaaaatacaccttgatcgaaccgtggccaaccctcaaagatactcttgatactctagaatccagatgaatggactttaaccgctgaactacggtatatatcgcccaaatatgcttctacgtataaagcgattcctttcttaccttcacatgttcttttatccatgaagtttcaacaaacaatgtcaaactttgacaagtagcaaacactcataaactagaggttcaaatcacatataggaaattatttggccaatcaattagtttggaataattattggttgtctacgcttctcaattgtcagcagctcttaatttcaaaggagctaattccatcgaaaaagaagagagagaaaaggtggtgtccccttaggcgatagataacaataatgagcaagaaagagttaaagagaccacaaagtgtggataagaaggtaaatgatactgctgaaacggagccatctccaaccaagatgccgccatcacagaatggtgtaaaagatggagacgagaaggaaaagaaaaagtataatttcttagttagaaccctgtggacattcgtaatgattgcaggtttttttgctacacttgctgctggtcatttctggtgtattattctaatcttggtatgccaaattactacttttaaggagtgcatagctgttactagtgcctcaggaaggaagagaaatctgcctcttatcaagaccttaaactggtactttttattcaccaccatatactatttggagggtaaatcactgttccgctttttccaaagttatttcctcgaatacaaattcttagcaacagtggccgccaatcacaaatttatctgttactgtctctatttgcaagggtttgtcatgtttgtgtgcagtttacgcaagggatttctcaagtggcaatttgctagtctctgtgttacacacatgactcttttactggtggttttccaagcacatttaatcattaaaaatgtgattaacgggttgttctggttcctggttccatgcggattagttatcattaacgatatctctgcctacttatgtggtatcacgttcggtaaaaccaaactgattgaaatctcaccaaagaaaactttggaaggatttttgggagcatggttctttacagcagttgctagtttactattgactagactactctcaccttacatgtatttaacatgccccgttaaagatattcgcacgaatttcttcacatccgtcaattgcgaattgaacccagtattcattccacaggattacagactaccaccaataatatttgaaaaatttggaatttcagtggttaccttgaaaccaatttatttccatgccttgaatttagcatcatttgcgtctatatttgcaccattcggtggatttttcgcttcaggtttaaagagaactttccaagtcaaagatttcggtcattccatcccaggtcatggtggtattactgacagagtcgactgtcaatttctcatgggatccttttccaacttgtactatgaaacttttattagtgaacacagaattacagtcgaaaccattttatctaccatcctcatgaatttaagtgaaaaacagattctagagctaatcaacactctgaatctgatattctttaggaaaaacctggtaagtgcgaacaactacgacgatttgatcaacatttataagtctgcagcggatgcgatttccgagaactaataacgaacaagatggagcatggaaaggggacatagagagtatataattttattccgtcatgtatagtttcgtacacttttccagttatgtaccttcctgcacgcatatataatattttattttatatcattctgtaaagttaccactcgctatactcatttaacggtcaaattttcagtctttcgttgcattgtttctcgaaacacgactctttatcgagataaaagatgactactaagaaagacacaacatatctacctctacaaggacctcgaaccacgtaataagatggtttttacacttgacgaagatattgaagaattatgtattagtgatgatgattgtgaagaggcacctcagcaacttttacaaccaatgggcgctgaacatgtcggtaaacatagaaggaagtcatctgttctcgagaagttccctgtagttgcacctctacattcgagaagattatcactttcagtaggcgaaggtcaaggacaaggtgttgatccaagacttttagcagattttaaacctgttcgtgtattaggtaagggcgcctatggtaaagtagtattggttaaagatgagcgtacttccaaattgtatgccatgaaacaattacagaaagctgaaattattattgaaaacgatgaatctcaggatgtttccaaacgtgtggaaagaatcttcgctgaaagaaccattttatctcaattggatcatcctaacgttgtaaaacttttctacacgttccatgataattcgagactctatttgctcttacaatatattccaggcggtgaacttttctaccatcttaaggaacgtggtactctagatgaagatactgctgccttttatgcggcagaaattagttgtgcactaaagtttttacatgaaaagggaattgtctaccgtgatttgaagcctgaaaactgcttgttggatgcagatggccatctagtcttgactgatttcggtctaagtaagaagagtgtagacgataacaattcattatcagcacctgaagatgtttctgttttacattcaataattggtactccggaatactgcgcaccagaaatcttgaaaggcgaaccttatacacgtaactgtgattggtattctctaggatgtctagtatacgatatgctagtgggcaaacctccatataccggtgttaatcacaaggttattcttaacaagattcaaaaggaaaagcaaggtccccgtcttccatactacctcagtgatggcatgaaagactggttaggtgctctgcttaagaaagattgcaacaagcgttgggacgtggaccgttattgggcagcccaaccgcaagcacaacaagcacagcaacaacgcagaaggaagaaaaaagctggtcaggaacgtacttcaccctataccagccatttcgtgtttcgtaaaatcaattgggccaagatacaagatggtccgctacaaaagtctgaacaaggccccatcgtacctatcattacggatctcgagctagcggaaaattttgacgaagagtttacttcgttgcccttcgaggaaaatccacagggaagagacattcctaagtcagacatcttcaagggattcagctacaaggccagcggtagctacttagagaagtacttttaagttgtgcctctcacgtgcccccatagtcatgatcatcggtacgtgatttttcaacatcttagggcccaaagggaattgaatcttacaaaggaggatatcaaagggggatataaaagaaggagatacctcggggaacctcttcaataaatccaacagcaatcctacattgaaatatcccacaaatgcaagcctttaaaagatttgcctctagcgttccctctcaattccgctccgtcatttactcttctcatagcttggaggatgttactagtgttttgtcagtgcatcgctacacacccaaggaatctttagagaattctgttgtggttcgtaccttagccttccctattaatccatcagatgtaaaccaattgcaaggtgtttacccttcaaaacctgaaaaaactttggattatggtacaaaagatcctgcagctattgcaggaaatgagggtgtttttgaagtcttatcagtaccatccaatgagaattctttgaaagccggtgattgggtaattccattgtatgcaaaccagggtacttggtctgatcatcgtgtatttaaaaatgcatctgatttgattaaggtcaatggattagatttgcatactgcagctaccattggcgtcaatggtgttacagcataccaattagttcacgactacatcaaatggacccctggtggtaacgagtggctgatccaaaatgctggtacttcaggtgtctccaagatcgttacacaggtggccaaagctgcgggtatcaatactctaagcgtaatccgcgatcgtgataattttgatcaagtggctaaaaaactagaaaatcaacttggtgccactaaagtaatttctgaatctcagaacaacgataaactttttggcaaacaggtgttgcccaccattttgggttcgaatgcaagagttcgtttagcattaaacagtgttggtggtaaatcaagtgctgccattgctcgtaaattggaaaaagatgcgttgatgctaacctatggtggtatgtcaaagcaacctgttactttgccaacttctcttcacattttcaaaggtctaacctcaaagggattttgggtaactgagaattgccgtcgtgagccaaataagaaactagacgcagtcaatgcgcttgtcaaactttataaagaaggaaaactcatatcgccaaaggacgaaatcgtcaccaccgatgtgaacgccaatggtagtgaccaagacttgttggaagccgtcaagaagggaatcagtgcttcaggtaaacaacttgttgtgtttaaatggtaaatatgaaactatagtaaatgcttagtgtagagataaatgcttcttctcgtagtatgcaattgacagcactacgcatgctacactcaacatgatgtatccaatgacttcccagcgcacaatggtcgtctgcgtgggctcacagatccagtcagagatacccatgaagatgatagcaccaagattaattgttgtcgaatacgatggaggtgtttgtctttgaattagtgagagtgaaaaaacatgaggtagagtaccaaagaggaatgcagctagtgcctccaaccaaaatactttatttgttggaacctttgccaaagtcgatagagcccttggcaagaatggtaataaaacagccatacagatcgatgcaatgtaagtcaagtgctggcactgatgagaaagcgtaatacgatcagaaaagttaaaccaacggttccaaagtactgtaaagggacccaacgtgagggcacctaacccacaaagtaaacaactcttcaatctatcaaaaagaaatgggtcctctaattcacctgtcttttggttgatagaaaatttacctgccaaaaggtcacaggtagccttcgtgtaagataccaagacgatacccattaatgcaatcatcataacgataaaattacggaacacattcttacgtcgagataatccacatacaccatacaataaggaagtgatctcaaaaattgaagtgttttgtataagacccacatcaaatgctggtgtcaatgacagtgcattcatataagtaaggactggcaccagtagaagtaatgataaaatcactagtttaaccacataacttactttcccgataatatcattatttttaactccattgtcgtaactgtcataacttcttccattattactgttgttattgttttcgccatccataataccattgcgttcaccacgggctctcaactctggcgtccccggtctagaaactgtcatggagctcgctattgataccagacgagcagaaggtactagtagcaaccaaggcacaaaatacataaacaacaggaaaattgcgaccccctggtggtcgataccaggcctctcactatcccttgcactcgattgtaatagtgagagacatttggtctgtatgatgtaactaaagactgccacaaaccagtaaatcctagtgtccatggtctggttcaagtttaagttatttctcccctaaacaaagaagagattctcaactcaagcagctctttaacttttaaatagcttcttcgcttgcgtacttgcctgcgtgcttgcttgaattcctcagctattgacagtttaattaattcacaatccctccagctcttcaactttgttgtattttaaggcccttatgctaagggaaaaagaaaaaataataatatcatggtgataacagtttcaaaccctcaaataggccttcttatttagcgacttgccagacgcctcgttcccaatactcgtccagtgtgagcaacagtccaaaaatttcgtgtcttgctgaatgtgggaagaaatgccttgcggtacctgttggttgatcaattgattgatccaacaattcaattcaaacaattcaaaaggaggtgttctttaggcccatcagccagcggatatctgcgatgctgagtctatgagttcttgacatagtaaacaatgtaattttttcctctactatgcagtccggtatatcaagcgggggtactgttctcttcagactcacttattccgtcatgtatagaagcaacatggtgtaaccaaaacacttgaatcgtattgttgggttgcatttttgctggaatagcggaagagtcaagtaaggagagcatgcgggtgaagaaactatcacaacaactgctattggtttagcgaggctgatcttggtctgaggtaaaccgccatgatatggctcgtgctaccatacttcgaagtatcgcacgtatcgtaaacttcaatcccataacaacaatggggactcttatactatgagcggcacataggtctgtttccataagaaacgcgtaaaaaccgccaggtcctcacaaagacagtatttctgcatatcaacaactgtatacaccatacccttcccttataaaatgcactgcaagcatcggcggctaaagcgtatgaggtaaaggaggaaattttataccagcatgctacttaccgcttccattttactccgagaaaaatggccgggtaaatgatttgaaaaatttcgacatcacaaaaaaaaagttttaaaaaatttcgaaactcatcaagttaccgttaactaactattgaatagtcgatattagctgaatatcaattgattagtcaatcagtcaaataatcaatcaatcatgcctccaaagaagaaggtcgaagaaaagaaggtcttgcttggtcgtccaggtaacaatttgaaagctggtattgttggtcttgctaacgtcggtaagtcaactttctttcaatctattaccagatctcccctaggtaatccagctaactatccatttgctaccatcgaacctgaagaagctagagttattgttccatctcctcgttttgataacctttgtgaaatttacaagcctgcatctcaagttcctgctcacttgaccgtttacgatatcgctggtttgactaaaggtgcttctgctggtgaaggtttaggtaacgctttcttgtcacacattagagctgttgattccatctaccaagtggttcgttgctttgatgacgccgaaattgttcacattgaaggtgatgtggatccaatccgtgacttgcaaattatcaatgaggaattgcgtctaaaggatatcgaatttgctcaaaaggctcttgaaaacgcacacaagattgctagaagaggtggtcaatctttggaagttaaacaaaagaaggaagaaactgttttgattgaaagaattatcaaacttttggaagacggtcaaagagttgccaaccaggagtggacaccaaaggaagtggaatctatcaactccatgttcttgttgaccgccaagccttgtatctatttgatcaacttgtctgaaaaggattacattagaaagaagaacaagcaccttttgagaatcaaggaatgggtggacaaatactctccaggtgatatgatcattccattctccgtttgtatggaagaaaaactgtcgacaatgtcacctgaagaacaagaagaagaattgaagaaaatcggtacccagtcggccctaccaaagattatcacttcaatgagacaaaagcttgatttgatctctttctttacaagtggtcctgacgaagttcgtgaatggactattagagagggtacaaaggcaccacaagctgcaggtgttatccacaacgatttaatgaacactttcatcttggctcaaattatgaaatactctgatatggtcgaatataaagacgagaatgcaatcaaatctgcaggtaaattactgcagaagggtaaagactacgtcgtggaagatggtgatatcatttacttcagatctgccgcaggtaagaactgaagtggtaatgggcatcaaatagtttcttcatgatcgttttagacttttccactatatacaagtaaagaaagaactactaattaactatttaattagaccgagaaataatgaattctcttaaaacaaaaatgaataccatttttgcttcctcttctcacgttcctccttggggataaatgtctttatgtgttcttgaattctctccgcaccggtttcgttatcgtagttacgacccatggcttctatgaaattgccctcagggtccatcaaatagaagaagatggaatgatcaactaagtaatcttgacccggttggacttgaggtggtgtagagaaatagacacgatattgcttgcaagcatttttaacctggtcataagtacctgtgagtccaataatatcgggatgaaaatcctgtaaatactgcgttagaacctctggggtatctctatttggatcacaagtgacaaagattggctgaaccttgctcccatactttgattttaatttgtccaaccaaactcccaacttgtccaattcatcggggcaaatatcaggacaatgagtaaatccaaagtaaataatggaaaatttgcctagtaaatctttatctgaaaacacattaccttcacaatctttcaaatggaatggccctccaaccatgggtttaccataacctctattagcttctgcttccttttcaatctctaaacgtcttttctccttggtgaaataatagtataacccaccgccaacaatcaggaaaagtgaagcggccttccaagtggaaaactcaatagacccatcagatgtagtctgaggcgcggtttcactaccaccaatcggtatacgactcaatggttttttctttaggggtggtgattgacttggtggaactcgttcattgtataatttagtaaactgggaaaagcagcgataattaggtcttataagaccagcttgtttaggtgctagcttcaataagcgtggtactaatgatgatgactttaacaaagacatctcaacccagattaatctcctgaagtcaatggattttacacgcttatgagatgacttaggataggaagagaaatgacatatttctttgatgtctcgtgagtatgctaatcgtccggagtgacaagtataagctctctggaacttgtcaaagaaagtcgaattataatacgcatgggtaagccaattgacataataagagtacaattaaaatgctatgcaacattttctgattaaaatgcacaaatttctgtaaattttggactactacttggggttttagaaaactatttgggcatttcggcgattaatatatcaatgctataaattaataccatgtttaccatcaatttaattattattaagggctcaaagctagctctcgatagacctagagctagagtctacatgcaatagtttagtgacatttagaagcctaacattttttttttttttatcaactaactagcaataaccatagtactgctcatcatggctaaaagaaaatgaaccttgaaatatacgtaagcttaggatttaattcttatcttcgcttgagatttaattctgatttgacaattgctgtaattctacaagacgtcatcccatacttgacaaaatataaagaagcatactaacataattatcaacattttggcaagttaggactgatcaatgaggctcggaatatcaacgaaacaagaacacactaaaaaaatctacgataaaccattaatagcagcggtgctactattgccagttatatatggttctttttcttaactattttgaaaaagttgttgatgttttgaagatttgatccattgtttactgtttacccacaatggcaatgacattgaagatataatcgtaaacctcatagttctggattgggtctcaaccacattccttaagactttgggatgaatggttcttcttttgcttaactcctttgctaggacctcactttcttactatcctatatatttggttgattggatactggctatattaactaagtcacctttactaaaaggtctaatcaaacgattctacagagatttgaatgactcgaaaccctttcatggtggagccctctagtggttcccccgtaagaccattacaaccgcagcttactagattccataccaatacaagcgatagaactgacttatacaactatccaagccctacccgtggtggtaatgattattatgaaagtgaagatgatttcgatgtatccaaaaaatttcaaggattaccaccatctccttccagggcagcagtgagatactctccagatcgtcgccgtagatcccaattttaccgtgatagtactactagttccccattagtggatcggtttaccgctaatatgcaggcatcgccaaagaaaccaagccatacggtagttccagtatctgaatacgatggtaccacagaagattttacttcaagttactacagccatgaaaacagacaagcttcacacttaagtgctcctcgtaataatttgtttggtagccaattgggtagacagtattcagcttccacaacctctaccgctgccatgtcaactgccactgatgagaaattgttcagaaactcttatgaaagctatgacgatgatagaagtactattacttcctcaaactttgcagagactcagttcgaactaaatcatccagtgcgtaaagattatgtgagaagagccaactctgaaagtaagagaagacctatcgtagaagatatgggtaaggcaaaagcaattttaaaattagataatccaattcctcgtggtttactagatactttgccacgcagagactcaccagaatttaccgaaatgagatatactgcttgtactgtggatgcagacgaatattgccaagaaggttactcactcagatttgctgaaatgaatcgtgaatgtcagatggtcatctgcgttaccatgtacaacgaggataaatttgcattagctagaactatccattctattatgagaaacgtggcccatctatgtagtcgtcaaagatctcaagtttggggacctgatggttggaagaaaatatctgtcattttggttagtgatggtagaactaaagttaatcaaggtgcattagattatttagccgctttgggtgtttaccaagaagatatggccaaggaatctgttaacggtgatgctgtgaaggctcatatctttgaattgaccacacaagtttctatcgattccaacttggactatgtgtctaaggatattgttcctgttcaaatggtcttctgcctcaaggaggaaaacaagaaaaagatcaattctcatcgttggttatttagtgcattctgtcccgtattacaaccaagtgtggtcactctgattgatgtgggaacccgtttaaatgataccgccatctatcacttatggaaagtgtttgatatggactccaatgtagccggtgctgcaggacaaattaaaacgatgaaaggtaaatatgggttaaaacttttcaacccactagtgtcttcacaaaattttgaatacaaagtttccaatatcctggataaaccactggaaagtgtatttggttatattgccgtgttgccaggtgcactttcatcatataggtaccgtgcattagaaaaccatgaagatggaactggtcctttgaattcatatttcttgggtgaaactcaagaaggtagggatcaggatgtttttactgcaaacatgtacttggctgaagatagaattttatgttgggaattggttgctaagaggaactctaaatgggttctgaaatacgtgaaagaagctcaaggtgaaaccgatgttccagaagaaatacccgaatttatctctcaaagaagacgttggttaaatggtgccatgtttgcagctctttattcacaattgcatttccatcaaatttggagaacgaaacattcgttcctccgtaaacttttcctccatattgaattcttctaccaatttgtccagatgcttttctcatggtttgccattgcaaatttcgttctaactttttactatttggctggttccatgaataatatcctcaagcatggtaatgcgctattcatttttttcaaatatctgatttattgtgatttagcaagtcttttcatcatatccatgggtaatcgaccacacggtgctaaacatcttttcatcctttctatgattattttgacgatatgtgccctttatgctttaatttgtgggtttgtctttgccattagaaccttgaaagaaaaggataactcaaacaatgtgtttgtgaatgtggtcgtttcgctgctgtccacctacggtctttatgttataagtgctttcctatacttggatccatggcatatcttcacttcttcgttacaatattttgtaactttacccgctttcacttgtactttacaaatcttctcattctgtaacactcacgacgtgtcatggggtactaagggctctagtagcaacaataaaccgctatctaaagccattgtcatgcaaggtcctgatggtaaacaaattgtggaaaccgattggcctcaggaagtggataagaaatttattgaaattaagagtcgtttgaaggaagtcgaattcgaagagccagtcattgatgaggctcaaaagcgtaacgattactacagagacattagaacaagaattgtcatggcttggatgttatctaacctaatcttcgtcatgacaattactcaaatctacagcgctgaacacacaaacaacggttacctagtctttattttatggtccgttgcagcactggctgcctttagggcactaggttcgtttggctttttgttcatgaaatacttgcgtatgatcgtcaagtacaagcacaaagctcaaagtacaggatcttggaacgttcgtaaggccgacgttgacaacaagagttgaaaatatccatatctaaattttttaaaaaatacgtttgtttttgtaaaataattcaaggtacttatcaatgttaattagtgacctcttgaaaatctatagttatcgtagttcacaattgcttgtaaaagtactttaaacccattctcgacctcctccggtgaagaatgttcgtagaaattatgagatagcccgtcctttgaaggaataaatatcattgaggttggtacatgaggtgcagtttgacaagagtcatggccagcacccgatgagatcggtctcacttcgttttctttgaactgggcataggcagatctggaaacgcattcgatacaagtttcgttgaatttaaccgccggtgaaagctgcaaaatctcccaatcataagaaagcggacctgccacattatcattcaaaaccctttcgatttcttttcttatttctttgacgacattttgaacgacagcgtcatcaggatgtcttacatctagtgtgaaagaggcttcacctggcagaatattgaccgaataaggcttaacgtcaatgacaccacatgtgaacaatgcttgatgtgattgagaaatttctgaagctcttgtaattatcttcgcagacgctaacaatgcatcctttctcaaattccatggtgtcgtacctgcatgggcaccaacacctttaacggtacatttagaccattgatacccctgaacgctggtaactatacctatttttttactttcattttctagtataggaccttgttcaatgtgaagttcaaaatgcgcatctattgcattttccttataagaagctggcgtaccgcccaagtaaccaattttgttcaacgaatcaaaaacggattcgggtttatcctcgccaattgacatcatctgataagcctcttgtaggcttaaatcgtgagaccaaacactactacccgtacaagacctcgcaaatctagcaccttcttcgttaaaccaaacaacaacacacacatcataatggggaacatatccattttctttgaaagttctcagcacttctaatcctgcgagtactcctaggataccatcgtacttaccagcttccggttgtgtgtccaaatgcgaacctgtagcagttggaggtttaccggtttgatcttgacccttataaagagcaaatatattaccaattttgtcgactttaatggtacagcccaatgctttacactcgtttacaaaccaatctcttacttttccatcaacctcagtcccagctagcctccggagaccaaatccatggggttctggagcccatctcaatgctgccccaaattggttaccagtctctaagatggtatcattgagtctaccagaattaattctaagtggtgctacagcgggaatattcaaagtcgctgtggttctagctgctgttgtagtagttgtcgagctcgtcattgatagcgatagcgccctacaagggagcaggaacttggaacgcagggaagccatcgtggaatgaagctcttataaatcctttggaaagtgtctaaccattgatctccgttggagttggcacaagcatgctgaagctcatggaacttccagtggtaaattggtaagataagaaacccgataatattttatcacggtgctaaagataacgaacgagcaccattttgaacgctttgggcaagtggaagagaagatgcttgagtaggaaaattcatccaaaatttgtaacctattttacagaatggatgctcgacatcaatagagagactttttcgtcttctactactttctacttttatgaatattcggaaaagttgacactcttgaagagcatcgaacccacgcatttccgttctaatcatgattacccgataaggtgagttatacgggaaaggtatttagaaccctaagttagggcgtaatattcatttcctttatttttagatgaccccgctctaagattcggacatcgagccctaatttttgtttcgtgtccaaccctaattattttttttttttcaatttttgacgttttgcgtatcgacacgttcaagaatctattaccagaaattgacactcaattaacggaaccatcttgtaactgaaaaaatcaacgaaaaccaccagagatctatttatatttttagaataagaacaagaatccgctagtgtgtcttttgatctattttctaaggtgcttttagttctttttttttctcttctttagattgcatctcttgaatcactcactaccatctcgacctccgctgccgtcatcatgaacaactacggtgctgaggatgagtattatgttaacttcaaccaagatcaggagtcgttgttgagatctaggcttggtagtcacagatcaggtagcacaaaaagagcgggatcattggtgagacctgaaagaaataggtttaacaatcctgataatcctcattattactatgttcaaaaagcacaagaacagaaagaccatttagacattcagccatcaacaactggtgttctaccgacaccaggtctgaggaggacagctgaatcttcaggatctctaaactcttcagttaatcttccatcgtctagaagtagacgtaatctatctgaagttcaagaggatttccccatgcgtgatatgagcggtaagggtaccagagatggtaatagtaatagcggtccgaacgacctccataacgaagatttgatggaattagagcatgaagattatttatccgaggaaaacccagttttaaaagctcctaagccagcggctccggatttgagaaataaaaaatctaaaccgctatcaccatggatgatctactgttatgtggtaaccttttgggctcctgcgccattattatcgctgtttggtatgccaaagaaggagagacaaatggcatggagagaaaaaatgggacttttatcagtaatttgttatgtgggtgttttcgttgcatatctgacatttgggtttactaagactgtttgcagtagtagtaagctacgtctacgtaacaattatgtggatcctggttacatgattatgaatggtaaagcattttccctggattcttcatcacacccagctgccgctggtatagacgctggtgctaatgttttatacccaccaattaacggtagcggtaaagatgcatcgtttcttttccaaaatgttaatggtaattgtcacgatttaatcaaacctagggagaattgtaccatccctcatgatgacgataataatttggcctggtatttcccctgtgcacttttttctcaagatgggagtaccaaacctaattttaccaaaccaagatattatgacggctgggcgtgtcacacttccaaggctgcaagagatgcctattatagtctggaaagttctgctgatgtttatttcacctgggatgatataagaaattcttcgagaaatttggtggtttacaatgggcacgttcttgatctaaacctattggattggttagaaagagatcaagttacttacccgccaatgtttgacgatatgcgtcattcgaatttgcaaggttacgatttgtctatcattctggcaactagtcatgaaaagaaagtagctcgttgtctgactgaaatcattaaagtgggtgaagtagattcaaagacagttgggtgtctggcatcagatgtggtgctttattcttcactggtgttcattttatccgttgtcatcctgaagtttttagtctcctgttatttcagttgggttgtcgctaggaagcaaggtgcatatgcagtggataacaagactatgaataggcaactgaataacattgaagattggtccgaaaacttgtactctcaaggtcctatgaagaaagtggcacctgaattaagacccggacatcgtaataaccccagtagacaatctaaatttgacattttcaagaagcgcggcaccagatcttttggtgttaatgaaatcacaaatgaaatggataatgatgatgattacttgtttgcggatggtagttacaaaggtatgactactatgaccacacaaaatgctaacaagttgcaaaacggaaatcaatctagtagtggaagtggtgcttccaaattccatgtacgtaaccaatctgccatgttttcatccaattctatgatgctcggtggaccaagtgctgcacctgtgccagtaccttcctcgatcgaatccctagacacttcaatcattcatcctgattgcgtacaacaaccacctctgaaccatatgcccttcggttatcccttgatccatacaatgtgctttgtgacatgttactctgaagatgaacaaggtttgagaacaactttagattctctttcgactacagactaccccaattctcataaactgatcatggtggtctgtgacgggttgatcaaaggttctggtaatgatcaaactacacctgaaattgttcttggtatgatggataatttcgtggtaccaccagaggatgttcaacctcactcttatgttgctgttgcctccggttctaagcgtcacaacatggccaagatctacgcaggtttctacaaatataacgatgagacagttccaccggagaaccaacaacaggtacctatgattactgtggtcaaatgtggtacaccagatgaacagggttctgctaaacctggtaatagaggtaagcgtgattctcaaatcattttgatgtctttcttacaaaagatgacctttgatgacagaatgacagaattggagttccaattgttgaagaatatatggcaaattacgggtctcatggctgattattatgagactgttatcatggtggatgctgatactaaagtcttcccagattgtttaacgcatatgattgctgagatggtaaaggatccattagtgatgggtctatgtggtgagacaaagattgccaataaggcccaatcatgggtcaccatgatccaggtgtttgaatattatatttcacatcatcaagctaaggcgttcgaatccgtttttggatctgtgacctgtttgccaggttgtttttccatctatagaatcaaatctccaaagggacctgatgggtattgggtcccaattttggccaaccctgatattgtggaacgttattgtgataatgtcacagacactttgcataagaaaaacttgttgttattaggtgaagatagatttttgtcatcgttgatgttaagaactttccccaagagaaagcaaatatttgttcctaaagctgcttgtaagacagtggctcctgatgaattcaaagttttgctttctcaacgtcgtcgttggattaactccacggtgcacaatcttttcgagttggttttaatcagagatctttgcggaaccttctgtttctcaatgcaatttgttatttttattgaattgattggtactctagttttgcctttagccatttgttttaccatttacgtggtgatctttgcctgtgtcagtaaacccactcctatcattacattggtgctgttggcgattattcttggtctgccagctttaattgttgttgtcacggcaactagatggtcctacttggggtggatgttcatctatctcttagcattaccaatttggaatttcgttttaccttcttatgcatattggaaattcgatgatttctcctggggtgatactagaaccattgcaggtggtaatgggaaaggtggtcatgatgaaaatgaaggtgaatttgaccattccaagattaaaatgagaacttggagagaattcgaaagagaggaaagaattgcaagagcagagaagtaatttaactgttttacttctaaacagtaggggaaaagatattcgttaaaagcatgtatagttatctattttcttgagttattcaattctcaagattggaatgatattagaaaaaaaagaaagcaaaatatttataatgaataaacggtaaaatttagtatttggttacctgaaccgaattccttcagaacattttcagtttctccccaaggaactccaaatataccactgtttatcttgggcatttctaatttgtaatccttgagcggtttatccaatttgtgaagtacagaattaatatctttttcaattggatcttgaattgcatttccgccttcataaacccaagttctgacgttctttaaaccttgttcggtataattaagaatcgatctcttgtaatcatgactggcgccaccaaaggcggaagtgaagagacaacatatgattagatcatcatccttgtaacttggaatgaacagacatttacccaataattcattaccatatttgtcacaggcatctacgtaaacttgttcagccttgggataacgagctgctaattgatatgcaattcccccaccccatgacccaccacaattacatgaatggatcaaaatacggggataaccggtaacaggaagaatattaccaactgtatatgtaatgttactcatattgtagctccttcgtgatttacgtctcggatagtaatgcagaagaatgcggttcatgcatggaaggatgtatatatatatatatatatatatttgtatctgcagaaggataatggcccctaaactcgtgaagtcagcagcatgaagatcatatgaggacccgttctaaacaaaagaccaattaaaaaattcaagtatctatataagaaccaaaaataaaagggctacaatgaatcccttattctatgtaacgagtgtgaattatatcatgacttaatatcattacaatgaaaataattatagtgagtgcactataatcagtagaaaattttttcaggatcgacttcagctaaatcgactttatcatccaataaatctttcttcatcatggtcaatctccattcgtgttcaaaatcctctacatcagcccaatattggtaccaacccttctctctaaggaaatttttaactggagttccgggaacaggccaaatataacatagcactccgtaaactaggaatgcaattacataaccgacccagtaattcaaatagtaaattcttaatgctccaacaccaacagtaacttgaggcgcgccgacagtaccaataaaacctggtaaattgggagcaatactgaggaaataggctactagagctctccagtttatcccccatctattgccatacatgtaaaaggaacccttttgattggaatacaaatgcatcaatttgatataaccccttcttactaggaaataatcacaacataccacacctgcgatagatgataagaaaattgcatatgctgaaagggccattgtgaatttacttgaagaagccatcatattccaggggcaaatgcacaatgcgatagcggcacagaacaatgaaccacgtttaatgttgatgaacctaggtaatattgaagtcatatcagtaccacatgataaagaattggctgaaatattagtacccaattgtgctataataaagacaaagacgatcaggaagacaccggctctagtaccacttgagtaggagctgtcgaggaatttacctaaaacgtcaattggagaccagtaattgataccataaagtttgtaaccggcagcagtcaccaaaataccgattagacaagttagagaaaataggaagggaatagaaaccaattggattaaagatgaagagtttggagttgtagagaatcttgcaaaatctggggcattgacgattaaagtggcaaagtttgctaaacagttaatcaaagatctgatgaagacccatgaaaatgcagaaccatgaggatggtattcactcaaattacccattgctagatgaccatgcgatttaaccacagcccaaattaaaaacccaaaggctgcaaatggaactaaagcagctttcaccgcaaacagatatttcagcttatgtggtggaattaataaaaatgggatactaacaacccagaagatgaaaaaactcatgaattcaaatgtagttgcgttatcagaaccgaaatggttaggaatttttgtgtttaaatcattaccaaaaattgatcttaacagcaatgataccagtgtaccacctaaccaagcttgcactgcgtaccatacaatagccattacgatacggttaacaattggccatgcggaaaaatagacaccgaaacttgccctcacagatacggggaaacagacatggtatgctgcaccgaatctagacgctaaaacgacaaagatacctgtacataaataaccaatccaaatggaaatccaacattgccaccaatttaaaccaatttgcatacctgaggacgctacttgccatgtgttaatgttaaaacaatccgctaaccagtagtagaagaaattatgccatccccaaattcttctcttgctttccaccggttttaaatcgctgttgttaagaaatgatctcgaaaaaggaattcctatggttgatttatctactacaagccagttgtagtaaaatttttgccattttccttgaggttcaatttcaggttcccagacgtcttcgacaacaccagttgttccttcgtacgcttcatcttccttaacagcaatcttatctttatgatcaatgctactactaccaccgtcgccatcaccatcgacatagtttttatcactgctcgagtttacattttcgaactctgcctgtctgctagacacgggtgggacgtgtgattggcgactaaacataatagctagatcatcatgaggtggtgatcttacttgttgtattccatgttggcgatcttcttcattataatcattagcttcttgttttctcttgccaaaaaatttcagacgcatcttctataaagtaggttctttgctatttgtcttattgaatatttcctagctataggtagattgagtcatgactccgattccatttcgacaaatgctcaactaccaagactacttatattgtgtattttccttatcagagttgaaccaattctctactgtcgatgcaatcttatcaggataattcgtaatgtgtaatatttcatctcttttcagatcggttcacgacatcgcctttcttcatagggcgaattattgtttctctaattttcaccagtttgagtcggacatcgtccaccatcaaacaaaatggtaaacgaaaattgccaaacaggataatcggtgagatgcggatttcggaaaaatgcgttaatccttaatctcgtaaggcaaaaggaccgacggcgattcgaatggtcaatttaacaagaaagcgacggagaagaaaattgcagtggttcttttggatgatatcagatagatcataaggaagatatgacataaaaaaaatccaggaaggggtatttcaactattattactatactaatacctacatgctattctacataagttgaagaaacaaaaaagtcggatgaaaaaagaaaaaatgaaaaaaaaattgttttggagtttgataaagcgcttttctttgctggactaacctcctcatgcatatcatactacgatcatttacgcttgatgattctcttgatcactgcaaatgggttgaaaatactaacacccctcacagagaaaatgtagtaaataccaaccatggcgaacatgttgaagacgatgtatacccagtagaaaccaaagtttctccaaagatttccatagtaaacgcctctttgagccatgtagtcatcaccaacagatacttgacagtaggcgcaattagaagttgcgtcaggatttgcaatgtaaccttgagcttgcttcataaaaccgttcatatattcaccgcaagtcttaccttgaggtggatcgaaatagttgagttctttcttcttgcaaacgactggttttttgtgtagcacaatagcgaccagattttgaatgaaataagtgaagggagaaaccttccacataaaagtccaaaatccgggcattaaactcactggttgagttacaccacagaattgaatcatcatggacagaatcaaacccatgatgacgtttgcagatggtaaattgggggacatgtaaagaatcgttagacccaacccgacgtagtataattggaacatgatacagtagttcaagaaaaagacggcagatctagatgcttcgaaccaaactctcaatgggaaataagaggcacagaagaaaaaggtcgagaataatatgtggtatgggatttcagccatgtattgggtgataagcaaaagtgaccaatggaacatatttgatttggattcacgaacttcaaacaattcacgagacgatatagctcttgcttggatttgattcattgaaggtgctgcgacaataacggaaataaaggcagcaaacatggtatcttgtaacccgacataacttttaccgggattgaaaaaggtccaaccgatgaaaagacctgcagtaacctgtaacatacatttcgaaaaaatataaggtacatctctccagaacatcaaatttgttcttaaccaaacatatttgaattggtaaaagtaatcagtagcatatttggtgggtgcgctaccaatttcttcattagtacattcttgatttgccaatttttcaatccattcggaagccttctgctctgttgcaccatattcatcagatttctgccagatttcgtgccagtcgtctttgacagtagcagtagcacctgcaccaatagcctccaagatgtattcagcaggattttccttttcttcacaatgtctagcaccgtttctttcgaaatagtccagcacaatagaagagttttcaccgatatcaccaaaataaacagtttgaccacctttcttcaacaataataatctgtcaaattgttcaaacaatgtagcggaaggctgatggatggtacaaagaatactttgaccagcccttgaaattcttttcaacagttgaacaatggcccatgaagattgagaatctaaaccagaggtaggttcatccaggaaaagtaagagatcgggcttagaaactaattctacaccaatggataatttttttctctgttccacgtttaaccctgcaccaagaccaccaactagggcatcagcatactcttccatatccaacaacttcataacggtttccgcatctgcaactttttctgcgtcaggaatactttgaggtcttctcaaacgagctgaaaagattaaggattctctaactgtcatttcagcaatgtgaatatcttgttgttgcacgtaaccggttcttctttcaaaactgctatctactggtttaccgttaatcaacatatcacctgtcactacaccaacattgacacgtttagccaaagtgtttaataaagtagttttaccggcacctgattcacccatcaaagctgtcatggttcccggtgccacataaccagtaacattatccagaagagttctttcaccacctttgtaagggatgacataacaaatatttttccagataaaaatacctttactagcaaaatccttaaaggactgttcgatttcttggtcgttgttaggagtaatatcactaccgctggagtatttgtctttaacatcttgtacattcatttgatccatagattccaaatcatcagggcgattgttcttcttagcagtagcatttctggtacctttcttaaagattaaggcatcaccaccacctttcactggacgtttgatttctgttataattgctttaaacacattgtaaccaattaaaaaggcgaacataataccgatgtttctccataaatgccagtatatgtattggtattggacattcaagtaatcatcacccaaaacccaggacctaccctttttcgatccaatgaaggcacaaactctttcagagtctggtacgttttcatagccaggacccgatggtaccaaagaacctttaccacaagccatgtgtctaccgtggaattcagactcaagcataccttcaaatgcatatctgattggtaaaacatatgaaatccatttgaaccatggatgcatattgggtaattggatcatataggtagaatacatcgaaatggcaaacatgaccaaacctgcaatggagttagcttgagaaatatcatcacaagctgatgcaattagatcgaataaagcatagatcgcttcagagcacatagcaaggaaccaataaactctgaagaaactggcagcggttctgttcaaacctgctaagaaatacagaataataatgaacaatgttagaccaatcattctaaatggtgcaccagaaaaagtagaacctagggcttcagctgcaggatgatacaatgaatacgttttatgcttttgtagaataggcctgtgatcaaaagagatgttggccaaacccatcaaagagtaatacaatagggcaaaataaagaacaccaccacgagagaaagcacctgctgttgaggctggagaattgtaaaaagcagaacctgtaataaaagcttgaattacagctgcggcaatgttaatcacagtataagccttattaccataaacgttctggaatcctctaacggtacaaagtctaatttgttccggaaatgaaacggtgtaataagatttatctctagcatatttggatttttcggctttcatggtttcggcaaagaactgcttagtggcttcagggtcaacactagctttgtattcttgaatagctttctttaggttggcacattcctcagaattcaaccaataattttctaagtcttctgctgtacgtgggactttattttcgtaaccttcacgaacaacgtggaaaccgtttggatctgtcaatgaggttaaaaattccgcagttgcttgtcttggtggacacaagtagcccattttctcaaagtatgcctttgcatctctagctgaaccataataaatttgtctaccactgtgcaaaactgtaactttatcaaaagtttcatagatgttttcactcgcttgatagatggtaacaaacgctgtggaatttaacaaattggtcatgatacggattgccattgcatattctaacgccgttgacgcatccaaacctctggtagcattatcccagcagtaaaaagtacctctagccgctaacgcttcagcaatggaaactcttttcctttcaccaccagaaacaccacgaacaaaatcgttaccaaccttagtatcgtaggtatgggttaaaccaaagatcgttgcgtataggtcacgggtttcacggatgtactcacttctagagacgttattgactctgatagccggtgttttacatgcaatggcaaagtccaatgtttgcttaactgtaagataaggaaaatggacatctaactcaccattgtagataacgtcacttctgtagtgcttcatcatagtatcttgtggaacaccatcgtacataatatcaccttccacaccacctgcaaattggtcagtcacccctgctgctgtctttaaaaacgatgagcatccggaacctggtctacctagaaccaaaaccatttcaccaggtagtgcaaacgcattaacattgcgaataatttttctcatacgtctatgtcttacaccttttagaaatttgaagatggtgtaaggtaaaagtgcaatatcagcaaacgtcgagccttccaaaaatgaattatcaagccctgttgctgaaacatcttccatggtaataccagttttcctgaagtcgataccttgtgaactagcattcttaacaaagtgccttagaattttttcagcatcgaatccatcttcatcatctacagatgataaatcaaactttccatctgccgatttccgttttgaaagtgttcttgctaatgattcaactttagaagcaagttctggtgtaaatgtagaaccttgaccattacttttgtatttcgctaacatttcatgtaattctacatcatcgttagcacctctctctatatctccccgactgaaaccagatgtatttgcaccggtgttaccttctgtatgaccgacaccaaccaagctaccgccatcgtaggatatgggcgaatttgaatcaataggtgatgaggaacctgtctcgagaacgtttccttttttcatcacgtcttagtatcacagcgtatcttcaaattgatgaaagatgtgagtgacagacggtcaagtgctgaaatgataacgataaacggttcatcgggcataccgtggtctgtcaacatgtgtataaatacgcttagttttctatgcaatggcaaatagatttcgtaatgctcgcttgggtaaaaagaaagcagaggacatatgtccgtccattagtaagtcatatttccgcttagtatccgcggatattaacggagaatcatttcggagaaatcccagcggaggaaagaaaaagacgaagtgagcactgttgatgtcacatactcgttgtgttcgtatgtaaccgatggatattagcgcgggcatccttcgttaacgaattttttgcacggcgctatcatcggatattgttgtcattgttaccaatcttgaggcacatcatgcactaatggaatatttttggttggtatttgtttttcactcggcaccctgattaataagggcggctactgcattatcactatcacataagaattattagttttcttgagggagaagaatcccccttgttttcatttgacacccttactaagagatgactaaaaggtgcagctactacattgcattgtagcatagatattattaattttatagaaaataagagtaaagaaagggcgcggggaagataaagcgttacatttggaggtgttcatacaaggcgctgccagccactggtttcgaaacgataatagcagcctccaattctgaaggaggcatatgaggaaacctttcgttgtaatattgcttaataagtgccctctttatatctgttacagattgttcgtctgggcaaagacttattgtgcatccaccccaaccggcacctgtaagtcttgaacccaaggaaccgttattgagagcgatgcgacagatttgttcggtcccttcacatgagcatccgtagttatcacggcatgaagcctgagatgcattcataagtgtgccaaaatctcgtaaaaactgttgtgtatcggtacttgtaccgtgtacgcttgtcattagacgtaaacattgcaaaacacgtagagcttctaagtacacgtgctttgccctgagataaagttgtagaaggtgaaacctaacgggaaaagaggtcagatactctcttgtaaactcttctggtgtcatgtcaagtgccgctgatgcttctgacatggtatatcccttgctctttggtcctagagtctcttcgactaatctcaatgcgtactgcagcttttgaatttctttgtcgatcttatcagattcattgatttctacagccgtgctctccgtgccttcacggcgctcgcacagagtgtaaatcacttgacgcaagtttcccggggttttttcccctggtaaagaaactccgtgtgtatgtgctaagacgctagcagcaatagtacattcaacaacacgtaaattgtagttggtaggtgccgtttcgaatttattcgaaactactaaggtatttgcaatgataaacctaacggatgcaggtaatgggaaaggtgttgcctttaatacaggtttaaattcgacgtatagggcgtgatccttttctccacagacacttgcacattgatccataccaccattgttgacacccaagtagtgttctgcatcagcggtaattcgcgtgagatcttgcttagaaatttcacactgcgaacccttgacggcccttatcgtagccaacgcggttgcgcagataaaagcggcagatgatgaaaggccaccaccagtaggcacacttccctgacagaaaacttgcatcccaacatctctcatcggctggccagtttcctggcagaaattttgtgcaactaacaaaccgcatttaaaatagtttgaccaatctgaaagtgcagggtctatacctattgactcttctagtggtatatcgaaacagcgtggtgcaaatttaggatctgcgttcgccaatgttatcgaagtcgatccgcgtactacacgaactgctaaaagcatctcaacatcaatagccattggtagaacggaaaaattacagtaatcgatgtgttcaccaataatgttgactctgccaggtgaacgtgaaacgaaatcagcatcttcgccaaaagtctcaaagaaacgacgagttatttcattgcatctgtctaaggaatatgtgggcacactcattgccaatggtatactggttaaattgttacagagatacattataatataacaaaagaaaaaacaaaaaaatagaccaaaataaaacaacagcagcaggtagcagaaatattacgaattaactttcgtctttatatgcctttttttcctccttctttaggagcaaatttaacttacgcaatgaccttatgataacgataccgtactgtcctagaactagaactagaaccggaaccgatgatgatcaatatcgctgtttggtaataccacgtctcgcagtttgtattcctccgttcttctccttttagttcttgcccggtttcgaacgtcaacccgatgtttgacgaattgtgtcaaggaagaatgatctcaatcagcttgaatgcaggcataataatgactatggtggtaaggcgcatgaagaaaaatgcgggggtagatggagaaaaaaggttcttttcgggcgagtgtgttccggacggacaagtgtattccgagccgccattgtgatttttatgaggacagaaaagaataaggaaactgagaatataaataagtacgaaatgcaattggataaagtgagaaagtaatggcggtggattttttactggagttcaagggcgtgaaatggtttctaaggttttggtaacaggcggtgctggttacattggttctcatgctgtcgttgaactattagccaatgggtatgaatgtgttgtagtggataacctttccaattcctcttacgaaagtttggcaagagttcaagtactagctaagaagtatgttcccttctataaggtagatttgatagatttagaggccttgaccaaggttttcgaggaacacagtgatatcgaaagcgttattcattttgcaggtttgaaagctgttggagagagttcacagattcctttacagtactatcaaaacaatgtaagtggaactctagtgcttttacagttgatgcaaaagtaccgggttaaagaatttgttttttcctcgtcggcaacagtgtatggtgattatactaggtatccgggtataatacaagttccagagacttgtcccttacagcctacgaatccttatggtcatacgaaatttactattgaaaatatcttgagagatgtttccgcatctggtggttggaaatttgctattttacgttatttcaatccaatcggtgcacatccttcaggtctcattggtgaagatccattgggtattccaaacaatttgctaccttatatggcgcaggttgcagttggtagaagagaaaaattgtcagtttttggtaatgattacgatacgagagatggcactccaataagagattatattcatgtagttgatttggcaaaaggacatgttgccgctttaaaatacttgcaggatcaagaaaatgatatttgcgaagaatggaaccttggatctgggaagggatccagtgttcttgaaatgtacgacgctttcactaggtcatgtgggataaagatttctaaggagatcgttggtagaagaaatggtgatgtacctcttttagtggctaaacccacaaaggcagaattagagcttaactggaaaacggaactaggtgttaaagaatcctgtgaagatctgtggagatgggttaccaagaatccctttggttattcacaacatggtgttattggtacaacggtacataagggcgactacgataatcgtcttgttactttgggacatggatctagatttcaactgataatttcaaacagaggagcctccataattgatttactggtagatggccaaagtatagttctgggtccaggtgacccaggtgattattcaggcgccacaatcggtcgttatgccaaccggatcgtgggcggcaaatacgacttggatggtaaagttcaccaattgactactaatgataatggtaatacaaatcatagtagtgtgggttgttacagcgaaaaacattttctgggaccactggtgaaaaccccttcaaagggagtttttattgcagagtatgttttattggatgaacaaccaagggattttcagagtgatttacaagtaagcgtcatctatacattagatgttcaagcaaaggcactagatattcaatatcaagcggttttaacgaaaggtgaatctacgccgatcaatttgacaaaccatacttatttcaatttgaacaaagttaatgcagatacggttcaaggtacggaaattcgtttggcaacgaacaaagcagttggactcgatggtacattacaccaggtagatgtatctacatttaacgacaaggaagaagaagttaccattctcgattcagtagagcctcgcatcgatcattgttttgtcgtagctgaatctacatctttagactctaccaagggtaaattacgtcctgtgcttcgggcctcgcatccagaatctcatatctccttagaagtcttgacgactgaacccagtttccaattgtacacaggtgatgggctcactggatttacaccaagatcgggtttcgcagtggaaccagcgcgttacgtcaacgcgattaatgacgagagatggaagaagactgtaacattgtcacagggagatgcttacagatcgaggatagtctataggtttacatagtagtgttttttgtttatcgaaaaaaagaaagtgttacattattttttatgacgtattgtgaaagaaagtccctcttcatgtatcagccgtgcctcatgaggctggtaagtgtgggggaacacgagaggaccatcacgctcctttcggcctacggtgctccgtcgtccgggcggcacgggtcattgtgatccgcaacttagaacagttattacggaacaagccaaattacgggcactacatataaagtattcctaaaatgcaattatgataattagaactactcaattgtttgacgtttttcttcgcgaatcgaagcattccaacgatgaccgctgcttttattcttgaagatcattctcacaggagatacaatcctttgaaaggtacctgggtcctggtatcacctcatagagcaaagagaccttggctaggacaaaaagaagttgcttctaaaccggataatccaccttatgaccctgaatgttatctatgtcctggtaattctagggctactggcgccaccaatccccagtacgattcgacatttatctttgtcaatgatttttctgcagttaaattagatcaacctcatgatattggggagagagcaggtgaagaaagtttgaagcaaagacttttcaagactgaatccgtaagaggcgtttgcttcgtaatttgcttcagccctcaacataatttgacaattccacagatgccattgaatgaagtggttaaaattgtagaagcatggaacgaattataccaaactgtttcatttgaagcggctcaacaaggaaaaccctttaaatatttacagatatttgaaaataagggaacagctatgggctgttccaatttgcatcctcatggacaagcatggtgtttagaatcagtgcctaccgaagtattagaagaattaaaatccataaagaattacagagaggagaatcactcgcaccttttgggggattgtgtagaattggaattggaagagaaggcgagaatagtactagaaaacgattcattcatcgtaattgtcccatactgggctgtgtggccatttgaaactatggttgtgtctaagagtaaggtggcttccatagataaatttaatgaaatgcaaagaagggacctttcatctattttacttgagttaacaaagaaatacgataacctttttcaaacaagctttccatactcaatggggattcatcaagcacctttaaacgctcagggtgatgatctggaaaatagttggtttcatatgcatttctatccgcctttgttaaggtctgccacggtgaggaaatttttagttgggtttgaattattgggagaacctcaaagagatttaactgctgaacaagcggctcaaagattaagggatgtggatggtacagtacattatttagaaagaaacgatgtttaaattattctagaagtatcgatctacgaaaagtgaacttttgcataatatgagaggcttagtatccaaaatttgtgttttgaattatacatcagcaagttacggggagagtatatcaaagaaatttttgcgtataaataatataaatttagaaaaccattaattgaatgggtacaaatttaaagttagtggcaaccgcagctcttttcattggtacaggcacaatctataccacagctctgacattggggtttactagagcacgaacatttttcagagctggcgcacttattacagcaactgctactgccctgacatgaattcttgcacgagacacaggcttggttcataatttctcttaacattttctatttgatttgttgtttggttctggttacttattagtcaattgagtccccagatcctttgctttctatcaattgatctcttttatatgccttgagatttaaacgctgacatatgtaacttttctttttctttagaagtgcgaatatttagctgacagcgcatcatatcgtacgagctgtgtttccagttaattccagtcctctcattattcaattagaataaactataggatggttggttgtagtattgcttacttaactaaatggcctataaatcagcgattgtttctcagccaaggcgcaagacagacatttagcactattcgtaatagtgtgaccaaatttcacgtgacatattttttaaataagttatacgctacttctttaatagaaccatttctcatgtacgtatggtttgtttcgcatccgtttctcacttgacgaaaactttatggtttattttccttataacacaccggagtcaaaagaaagataaaaacaaaaaatagataaaaaatcagccgttcattaagcggctgacgttgagatagattttctttaaatatacgctagtttgtcattactccaaggccacttaaagtaacggtagccatgaattagagggatattcttgtttgttatgtcagaattattctggtgaagatatatgtgtgaattgtaagctattttttgatattgtaaatgttatcgtttgagaaccccttcaaattaaattataagttcgtttagttgctaactcagtttaacgttcttttaataactgtgtggagagtatttttcagtagagaattgagttatcaactactccacattttctatgagatatcactgatccctggaagaatactctgacgtttaacaatacatggtgctttttttgagcatatattcttgaaacgggacataagatatggatagtggataggctaagagcacttcaaaaattatggagtgttacataacagcatcctatataccgttaagaagcaaaacaattgcttggtttacgactagatacttaaccaaagagtttctatttagagtcatccatcttatctctttaatatttctaatttttaatctgggaatagaattcctttgaatgggtttcaaattggtccggtaacagttctagtacctagtcttatctgcagtggtcgttaatggctgtaatgtagagtaaactaatcggtaaagctccggttattaaatatacatatctcattgacgaagtcgaagctgtcatatcatgtggtaatctgtatttgtttggaggtacttctagaaccttaaatcttctggaaatataattactttgacaatttggccgagtggttaaggcgaaagattagaaatcttttgggctctgcccgcgcaggttcgaatcctgcagttgtcgtttttttttttcttgaatttgttgtacaactcgatagatgtgattccataatagaatatttgcaagcttgtcccgatgtcatggcaaattttcaaaaactttatttcagtgagagcgggtagaaagagcttagttctcaaaagttctttctttctggttaatcttgctgtcctccattcgaaccccctgggatgcttttttttcttttcatttcgattatcgtcacaatgtacgtagttcaactcttgaggtggcaaaagaataaaggtcgaccttaactaaggactagtactagtacttttcaccaatactacactccaacggtaaaattgtagaataaatccagagtatcaatatgggacaaggtctttcatctggtcaagataaaaagaagaagagaagcaacaaggagaagccaaagtatgagcccccagtacaacccagatttggtagaaagaagagaagaggtggtcctgccactgcagaaaaactaccaaacatatatccaagtactcgttgtaaattaaaacttctgagaatggagagaatcaaggatcaccttcttttagaggaagaattcgtaacgaattctgaaatattaaaaccttttgaaaagaagcaagaagaggagaagaagcaattggaggaaattagaggtaacccattgagtgtggggactttagaggaaattatcgatgatgatcatgcaatcgttactagtcctaccatgccagattactacgtctccatcttatccttcgctgataaggagttattagagccgggatgctctgtgcttctccatcataaaacgatgtctattgtaggtgtattgcaagatgatgcagatccaatgatcgctgctatgaagattgataagtctcctactgaaaactatagtgatatcggtggattagagtcacagattcaagaaattaaggaagcagttgaattaccattgactcatccagaattatacgaagaaatgggtatcagaccaccaaagggtgttattctatatggtgcaccaggtactggtaaaactctactggcaaaggcagtggccaatcaaacttccgcaactttcctaaggattgtcggttcagaattaattcaaaaatatttgggtgatggtcctaggctttgtaggcaaattttcaaggttgctgctgagcactctcctagtattgttttcatcgatgaaattgacgctatcggtacaaagagatacgaatctaacagtggtggtgaaagagaagttcagagaaccatgttggaattattgaaccaattagacggtttcgatgatagaggtgacattaaagtggtcatggcaacaaacagaattgaaactctagatcctgcattaattagaccaggtagaatcgatagaaagattctattcgaaaatccagacatgaacacaaagaagaggattttaggtatacataccgccaagatgaacctaagcgaggacgtacgtctagatgaattagtaacttctaaggatgacttgtcaggtgcagatatccaggcaatgtgtacagaagcaggtctactggccctcagagaacgtagaatgcaagttacagctgaagatttcaaacaggctaaagaacgtgttatgaagaacaaagttgaggagaacctggaaggtctgtatctatgagttgatatctaaatgtgtgtatacgtattatcagtatcattactataactacttctccccgattagctgttgatgccttgtgtgcatataatgtatgcacattatagtgcttctaaatctgtcttttgtatcacgtgatttatcaaagccgttcgttttgatctgaaggaaaaaatgggctaaaaaaaaccatgggcctaagagcagcaaggttctaggtgttcctaacaaaagtttagcaggttaaaagaaaaggaactacttgtttgtttggtgttgtggattgaattaaattgaacagtcattgtgctcagctctgatatcggatttatatcccttggttaattctcgctgtctcacggttttccagggaagtcgtattttgattgtcaagttacgtttgcatagataagagaaggtttgtcgtcgtcattgttgtcattgtcattgtcgttgtttctagcacttgctgaaacttgagccatagttgattggtattgttaattggtattggttgttctttaagtaaaaagaagacgataacaatctattggtgcgatattatttataaatcaagcaattgaatagaaaatgggtgttagtgaagaagatattagtggtacgccgactgagtatcagctaacgtatcaagtcggtgttgcagagaataaaaatgcaaaattccgcaagactatggaagatgttcatacatatgtgaagaattttgcatcgagactcgactggggttattttgcagtatttgatggacatgcaggatcgcaagcgtcaaaatggtgtggatctcatttacaccatgttgttgaacaaaaattattggaagatgagacgcgggacgttcgggaggttcttaatgagtcgtttgtctctgtagatcgacagatcaacacgaaattatcgggtaatagtggttgcacagcggctgtttgcatattacgatgggaagtgccggacgatgttgataatcaaactgcagactttagtcagcatacaagaaaattatatacagctaatgtgggggactcgagaatagtactatttcgaaaagggaggagtgtaaggcttacttatgatcataaggcctctgatatattggaaatgcaaaggatagaaaaatcaggaggactcattatgaaaagtcgagttaatggtatgttggcggtaacaaggtcgtttggtgataaatttttcgacggattagttgtaggaaatccatttacaactagtgtggaactaacacgagatgatgaatttctcatagtggcttgtgatggtctttgggatgtcattgatgatcaagatgcatgtgaattgattagggacattaaagaacctaacgaggcagcaaagactctcgttaggtacgctttagaaaacggaacaacggataatgttactgcaatggtggtttatctttgacgagctacttgatcttatacagttttacaacaaagtggttgtcattgatgttagttggtaccatcctttttttttttgtcgaatcttcggcagagccattgatctttcgaattcttctcctttcacgttaatcttatcattgtttaattggtctttaaatgtataatagttctcctaaataagttgatattatcatggtgctctgcggagggggaatttttcagtttcaaatgttaaacccatttaagtctaaatccccaggatccccagtggctgaccagtcgatgttcaaatcgttaaagtcgtttaatgtcaaataatcatcactattatcgactactccgttgttaccaggatctcccaaggttccagcgacatcgttggcgttctccgactcaggcaacccagccgtagggtcatttgagcctccttgtttattaggatctggctcaccacccatgctgcccatatcaaatcccgtatccatgttgggaaacattgatatatccattccacctaaatctccaagatctccttgaggtagaccctgttcttgtttgatttttgtagaatattgtcgaggtgaaacgggcttatcatccgagttcttcgggatagcaccagtttcattcatatcgccagaagcaccagggaaatctgccagcagaccacttggtgtgtccatcgaaaatttcattttcaaatctggctccacgtcgttatcctgtttttgttgtttttgttgttcttgttgctcttgttgctgttgttctttctcttgttgagctttcaactccatctcttggtgtcttctcaactcttcttgttctttgctctttctctcttcttcctcctgtcgcctcctcaactcttccctttctctttccttttgtaattccttctctctgccaagttcatagatggcttcaacgtaatctttactcttacctagtgtcgtttccatatcgtcaaggattgcatggaagatatgaattttctcactaagcattctttgttgattgtggctaaatccattcacgactgatgaatctagttgtacagtctttagctgctgatgtagcatcatttccacggctaccctcattatatcatcgaagcactgcgtaagcttattttcatgcaggcgaccattttggggcggcgattgtgggattatttctggtgatttactagccattccttcttaccaaagtatctttgacctgccacttaatagatagaattttggcgaagatgtacgtaggttttaaagttgagggttattttgtcgactcttccactcttgctagtaagaaatttcttctatttgggaggaattgatctaccatttttaacactgccaagagactgacaactttgttgaaaatgaagaatgaaaatataaagacaataccagttacccgaaaggaaaactcttctatataagaaacacaattctgattagtttcaagaccctggtgaatgggaactttgggttttgaggttaatcataaggccaaatgagtgaaggcataggttccgtagtgattactggcggtccttgaagaagaagtttgggatctacgctaacgagatggaattgaatatagctgccattaatattagctacgagttcttgttgtagcattggatgctcttggatatcatcaagtgttaaattctttgcttctttcgaatgttttctcctattatacgatttggaattctttgaacgtcgggagagaggagagtcggcatgattatgtggattctctgattgttctgatgctaacaaatcgcagtttccatgcggatcacgtcgtttcttactacttgttctacctcgatccctgctagttcttttttgtctcttccatttaggtgagtcttgcttctttgcagattgagtttccttccgtgtaggggtaatattattagtgttattagcgcttgtaagagaccttttgcgcttactacttaagctgtttctttttggtttctctttcttttgagaccttacttctaggtccttcttggccttaccagcgagtctattattctttagcacatttcgtaatttggaaatgtaacgtttcaaggactttcccctttgaatatattgatgttccttaaaaagtacctcctgcatttttgttcaggtgtggtaacgaatagaaaaggatgttcttgtgtgttatcttttatcttctttttatatgcgcggcaaatcctcggcggctatttctcgagaaaatgaggggaagttgatctatgtttagaatggactcggagggatatataaaaagttttgatctaatgctccaagatttatgttcctaatgcatgaattcgtatttttgtatgtgtatctttcctacaaaacgttgaaccgcctacaccctaatatgaatgccagttccagttgcacaaaagagtagtattctctgtaaattatgtgttgcaagtgcatctcagagccataacgattgtcagttggcctgattttctccataatctccccattccaattctaaactgcgcactcatgtgacccgatatttacttcttctgaggtctctgaccaagaatttgggaagaaattataagctatagctgccaaaggatactataccatctaatttgactccatagacattagccgcccgaaatacaatcgatatatttctcaaccaatggcatagctccgttcttcaaagtaccgggtaactccttcgatggaaacagaaaaaaaaaattaacgtcaggaatccgtcgagatgttcatcgtctggtaaagcccctagccaacctagcagaacggaccactaacaagtaacaaacttatattggtactgttggacctacttccatctttgacttgcggaggcttttaattgaacaacagataaagaaagatgttccgtctaaacgctgctagaactttgacaaaatctgtcaacgctgttgctaagcgtacttatgccgaagctgccgcaaatgattttctgaaattaaaatttgctttacctcatgaaactttatttgctggtaccaaagttactcaagtcaatttgccagcaaaatctggtggcgttggtattctagcaaatcacgtcccaactgtggaacaattgagcccaggtgttgtggaaatttttgaaggtgccaacaccaagaaatactttgtttctggtggtttcgcatctgtgcaaccagattccactttgtgcgttacctccgtggaagcttttccattggaatctttctctcaagagaatgtcaaatctttgatcagtgatgccaacaagaacttgagttcttctgacgaaaaggttgctgctaccgctgctatccaattagaagttctggaagctctacaagcagctctaaaataagtttctaaatcttaagaggaaaatgactatacgatagaatgagattgagaactgtaaatgggtggaggtatatagttagtgctgaaatgaacccatgacaacgtgcctccaatgcatgccattcttcagccttctattttgtttgttttattttttttttttctactattcttttatcactacataaacgattaaattcatattcaaattattggtaattatttggtacaagtatgtcacgctgaatgaaactatttgatgactctcgtaaataatattactggtattagcagcagttacagattgtgccgaatattgcatcagtacttttttgagaattgatgttaataattacgcgattatagttacgcgacattttacgcgtttattatatatattacgcgtactacgaataactcatcaaacccttttaaaagaaaaggtatagtgctttctcagcatgtcaagaatttcacattgaattgattgttgacttggacttgaattgaaatatattaaggactgagctgtctgttttctaaaaacctagaagcacttcaccagctcataataattgctaaagatgtctgaaacacatactattagtatatctgctaagaatggaccattggctcaaatatggttagctgctaatatgtcaaatttgggtagaggccaagtgcttcagactagtattagtgaatctgcaaatgagattgcaaaggcgtcaggatgtgatgagaatgtgactaatatcgaacatataacgcttcgtacttcaggtgaacttttacaaggtattgtcagagtctattccaaacaagcagcttttttactatctgacattaaggatactttgaccaagattagcacacttttcaaatcgaaccaaaggataaatattaccgtcaacagggctaatactattgccgcggtggaccaattgattttagaggatgcagttactgaaaaagaagttttagcagcaccaagtttggattttctcgacgataaccaaattcctgaaggtctcatgggtcaagaaactgaagaaagtcatcaaaggagagtacaaggtgcagcaccatgggatacttcactggaatttggtagaagattcgatccagatgaagacttagaatataatcaatcgtcaggattagatttagattttgatattgatgatggtcaattgtcaaagactgctgaagaaggtactcgtcaatcgcacgatgttgtaagtcaatcgcaggaaccagagcatttattgatgggtgaagatgattttccattagaagatcctaacaatgtagattgggatttaggtatatctgaggaaaaggatcaagaaagagccacttcagaggctggttcacacgattctgtggaattaggtcgaagagctgaagaaagatcgatgactggggaacccatcgattttggatttaaccttgatattgaaaaagatgccggagatgaggaagatcaggaggaaccagaaagtgatgaacagcaacaaaaactacaggaagaggaaagagaaagagaaagaaaggaggaagccaaaagagagagaaaagctagaaaagatccagctctacgtaattgtaaaagaattcagcaagatgtggaaacagagcttgatgatcattcgttgaaaactgcttcagaggaaatattgaatggacggcctgaaactgaggtacaagacctgcccaagttgaaccaaaagagattatggggagaaatgatacagagcttgtcttatttacctcaggaaaccattgaaaggttgacatcattacagacctctaaaaaaccaaagacacaggtggaatcagaaaatgaagaaagtttcgaagaacctcagatggatatatcgttaggtctaaatgatgacctcctaccagaatcaagtataagtagtagtcgtccaccatctgaacttggtgaaggtgaccatgaatcgcctatggctgcagatatcggtgaacatcccttagatcaaggtcaagaggaacatggagaacccaatatcgaacaatcgacacaacaagattcagatgaaagagagccgtcatcctcacagtctgaactcgatgattctgaaaaggtgaaattgaccaccggtgaatttgcttcaagggaagcggtagattttgctgaattgatgagggttgaattcattgataatgattctttagaatttgagaatcttcttacaactaagaaaagggctcagggagttgaagaagatacacgtctgacaagacaagaagcaacgaaaggattcttcgatatgctttctctagcgacagctgactgcatcgatttaaatcagcaggaaacttttggggagattaacatctctgctagaccagcactttatgaaagattcatcacagcatagggaaaaatagaaatgaaaacgagggactaattttaaatggacagttattaagtactaaatgtgtaatattcattatttgatgtttttaatatttactgctagtattattattattatgattatcaacaagttcgacagaccgcccatctcttcgtatgatgttatctcatcttgaccatgaaaatttttggcgcttaaaggtgaaaatatgatgagatgagatgagatgagatgggcatcctatttaactaacagaaaacaaagaagacgtctttttggaggctatagcgtttgttcttatatattatacgaacgactatggctaagcagaaaaatacgcccaaggcaactaataaattcagatatgcctctttcaaggataagatcgatgacttaaaaattgaaccagtgaggaatctggcaacaagagcgcatgattatgttgaaacttcccacttttttgcatcatttgagcactggagagaaattaatttgagttcaagctttactagttttgcgggagatgttgaaaatattgtacagacattacctcagattctttatcatgaggaaacaattttgagcactcttttacattatatcgacagacatgagcctttatcattgcaacctcttttggatcttctggcgcagttttgccatgatttgggtccagattttttgaagttttatgaaagatctgtcaactctatggtgagccttctcgaggctgcagttagctttgaatcctctgatgtatttgaatggactttcaattgtttggcatatattttcaaatatctatccagatatctgacggaagatttggtgccgacttttaatctactgttcccattattgtcacattcaaaaacgtacctttccaggttctcagcagaggcaatgtcctttttaattcgtaaatccaacttaaaaaatttggtgggattcgtttcctttgcctttaaaaagctagttgaagtggaagaagctaatttctacgatgggcttttggctcttttcacagaggcactggtatcgactcaagaagcgctgcattccaaatgtaggtctattttggatattttcattggagaagctttggcgacaagttctgatagatcgggaagccttctatgtgacttatggattaatcttgccagacatgcttcatttgacaatttacagcctgtctttgagagtgtggtcaacaagttacaaaatgttatcgatgcaaataatatgaaccaagcaacaaagattattacaactatatcatttgcggaaagcggtaagaaagttggtaactggacgtcagtagtggagttagtaaaagtaataatctctcaaaaagataggtccaaactaagtccccaaacgctggcatttttatttatggttttacttcgtaattgtgatatcaaaaatctgacacatttccataaaaaattgtatgagttctacctggatgaatatcctgattattttactggattttttaaggcatcagtagattttacggctgatagggtttattcttttaatggaaacaggtacctacagcagtacctgaataagcattggtctacacaccaagaacagattagtttatttcttttgcaatctagcgatgattccgatgctaataggaaattggtcgtcaagacaccagatgaatttgcaagatcgattttagaatcattgaaagtttacggtaaacatatttccgatgatggtttattcgaggtatgtcaaggcagtatactactgtcgaggtctcaagaaaagaatgaagatgtacttattccggtacttgaaaatattttgaatgcttcgtctccagtaacagattttaagaaggatgtgttggggtacgtactggatgctctgcagccttcggatcaagaaactcactaccagcttttaaatgatactctacagcagctagaaagttatagagacagtctggttttcattaagagcttaaataaatacctgcttggattagggaaagggcccaaattgggaaaatatttgagtggactggatgattatattagaattctttctgaaaatttgaccttacctgacaaggcacttcgttatgagactttgaaactaattactactttgatggaagtacaagaaaaagaggtaccgcaacttctcaatgattgtaaaatcatagaagaaatccctttgacgttattaaatgcccgtgatttaagtataaggatcagaaatatgggatcaacctttgcgaaggtagaatcaggaagtattataacgtctttgtttttcaaatttctgtttggtctgttgactataaggttttcccctgtctgggaaggtgtttatgaagtaatttccaatgcttatggtaaagatcaacaattagtttgggacctcatcaagcgatttcttgatgcacccgatgatcaccattgcttaacttattatgatgattttatggttggtgaagcggacatcgatcgttggaatgtgagagcggtgagactccatgagatattagaatccttttctaacacatggtcaggttattgtttttctaaatcaacaattgtagaaacaatgaaagcaagaagagcaaatttagattatcccggtcaactcagaaaccaaactttaaagttgatgcttttggttccacaatttgttgagcgccattcaagagatataataccgtacttattcaatcaagatgaatctacggaaatttttgggcttcaagaagagaaacgaggtgatttgggttctgcagctaggtggacggaggctgatagaaatttgctgttaaaagtaattggaaaattcaagaacatgaaatctatctataggttccaagaggtccatgataggctaatgcttttgttgggaagtagaaacacagaagtacagaaattagcttttgaagcacttctaggataccatgattctgtgctcacaaaatatcgcgacaatttaagaaatttgcttgacgatacactatttaaggatgagctccttaatttaatttctacaggggactcaaaacttatcgaagaccaggatgagcctcagttgatgccttacgtcgtgagaatattctttggtcgtgctcagacacctggtaccagtggaataaagaagggtaggaaacatgcggttatctcaatgttgcccaatttacgagatgaatatattgtagaatttttgaaattgggtagtggtaagtttaattatcagtacttcttcgaaaatggacggattatagaagattcagaggtaacggcaaccacattgcgccgaatgctaggtttcgttaatattgtcgactatgctttgggagttttggcttcaggttatcccaaagtcatggcaacgacagttcgcccacttatctacactattcacatgtcttatcatgtttctaatgtggaagagaaggaaccttacatggctaaacttgcagctaatctaagacagcaatcaatgaaatgtttgaataatttgtttcaatatttggggacatcttcggtgctgaacgaatttattgaagaaatctgtgatatcgttgtcatgcctcgtatcgaaaagttcgagaatgagaacttgcaacagccctcttcaaccttgcgaatgatttcatcctggtcaactgtaggtgaactttatcccttcctttactttaacgattatgcttctccgtccgctatgatgagggtactgtctaatccaaatgctaaggaatcggttgtgggtgtgatattagaagctgccaacaatatcgtgacaaacccagtaaacaccgatgaatatgcggatttggtgacaattgttgccgccaactgcttgcgagtgttgccaacattgtataagaaaattactaatccggagatcgtctcgacttctattgatcttttgttaaatttggtttacgccggttatctgcaggataatgaaaccagaaaatacttggtagattctttcaaccatattatcagggatgcgttcaaaggagttagcaaaaaagacgtgattaaagttttacaggttttagctgcactgttgaaggattacgactgcgattgggacgacgttaaggatctgtttgaagcggtaagtggcctacacgcaaaatatagtgaaaagcagttgaaggagcctctcaacgatgtttttgcaagttttgcttgcagatttcctgacttgcaaaagctatcgaaccttctatcagacctcaactcgttttcttccaagcatatgctggaatacgactttccaaggattttatctgcttttaaacagtttcatgaagtgggttatagagaatattcagaaaaacaatggctgccaatactgttcacctgtatgttgtatatcaatgatgaagaggaacttgccattaggacaaatgcttctcacaccttctgcaaatttttcgattatctcaacgaaaagccttcgcctgatgccgccgacgaagcagtcaaaattttgaaaaggttgatcttacctcacttacgttccgggttaagaagaacatcagaggttatacaagctgaacatatttcagtcctttcttacattgtgagtaccgggaagtattttactgatttagacgatttgcgagttctcctttacaacggggacgtcgaagccaattttttcgtcaatgttgttcatatacaacttcatcgtcgtttaagagctgtgagaagattgagagagcatggccacgaattgtctggttccagtatttcaaactatctgatccctattgttgaacattatgtgttttctaaagaggaaaaattcagaaacattggtaatgaggtcctcgttactattggtgttttggctaactttctgtcttggagtcagtacaaaggcttgttgagacgctatatttacttcttaaagtcaaggccagataacttgaaagagtcagtcaatttgattactcaattgtcttctgctttaaaaaattcattatgttattgtagacataagtttaacagtgaagtggtgctgaagaaatttccaatcgaattggaggaacctgataattttgtaaccgaagagatttatcctaaacttacgagtgttttgcaggttcgagacaatgaaacggcagtggctagaattccgctctcggaggcgctggtgaactttgttattggtttggatgaggtaaagcttgtaagcttgcttccaggtactttaactagtctgtgtcaaatattgaggagcagatcagaagaattgcgtgatgctgtaaggaaaactttagcggaagttagcaagattctaggtgcagaatatctgccatttattctaaaggaactaatttctgctctgaggaggggctcacaagtccacgttttaagtttcactgttcaccatgtgttgaaaactttggaggctgctttaaaaccatcagacctggataactcttctcaattgttggtcaatgttatcatggaggatatctttggttttgctggggaggaaaaggagtctgataattaccacactactatgaaggaaattaaagttagtagaagctatgacacagctgaaatgcttacttccaacatatccctaccttttttttacaccgttttgaaccctgtgaaggcgcttcttttagaaaggatgaatttgaaaagtcaaaataagttgaatgaattattgagaaaatatgccttgggtttgaaccgcaatgtacaagctgcttccactgaggttctaggtctatgttatgaaatctttgaacagtctgagacagtgaagaagcatacaaagagcaatagacctttggtcagtgaaaacgaagagttcttcctaatcaacctcaatgccaaaagtgggagagttgagaacgagacttccttgttaaatacaaccttgcagaaattttcgttggatctgctgcgtactgtaataaccaggcatcgttcccttctcgaggttaaatatctggagggatttatgcccctgttaaagtcatgtgtgacttcagaaaatgaggacgtgctaactattgcgttgagagttttgctggttatggtaaagctagagttccccgagagttcggagagtattttcgcaaattgtgccagaagggttctgaatataatcaaggattctccttctacatccagtgaggtctgccaagtgggcttaaaatttttgtctgcagttatccgtcataagaatatcaaactcaaagattctgctctaagttatgttttgggaagagttttgccggatttgaatgaaccaaataaacagggtttagcattcaatttcgttaaagcattggtttacaagcatatccaattaccagaactatatgatgtcatcgatactgttcgccagatcatggttacaaaccactctaaagaaatcagggatgtttcgagaagtgtttattatcaatttttgatggaatatgatcaaagtaaaggacgtttagagaagcaatttaaattcatggttgacaatttgcagtatccatctcaggatggtagacaatcagtgatggaattgatcaacctaattgtgaataaggctaattctgttttgttgtccaagttatcctcatctttctttgtggctttggcgaatgttttctttaatgacgatgctcctcgttgtcgtgagatggcctctttattgctatccaaactgttatcaaaattggatcctgagagtttgacgactgtggaaaaatatatcactgcatggttaaaacaagttcaaaatgttactttcatgaacctcggtttgagagtgtataaagtttatttgacgagtattggtttagaacataacgctgctctggatgaacttgccatgaatcgtgtcaaaaccattatctccaacactgacgtgggatccgaatcacaatgggatctcgtctattctgcattgaatctgtttattgcatatgttgaacggtcagaaaagagcttcggtgtagcattccgcatcacttgggataaggttataggttgtattttgtatcctcatctgtgggtccgtcaatcagcttcacgtcttgttaatttattagtgaacaacctcgacaaattcgagaagaagtttactgatttagaagttcaaaacgttgttagcagaactatgcgtcaactgggggcaccaacggttcctgaaagtttggctgctatctccgtcaaaacgttgatgaaagtagctatgagatggaaagagaataatgtaccattcgtccttaaagaatcagacaatgctcaagaggtccattactctagtgctctcgattatatgatcgtcagagcaggtgctatcattagaagtgaagaaaatcctgcggattcctttatgagtaaaaaatcatgcattcaactactggcgctattggtacagattttggatgaaaatcaacttgttgaagaatctgaaaaaattatcatgtcattgttcaattatttggagcaaggagccggtgatgggttgaacgaagaacaacaagaattgggtaatcttgctcaagaatgtttgcaaattttggaatccaagataagtgtttctgattttacccaggcttatgctaatgtcaagcacaatgttttgactagacgtcaagaaagaaaagctaaaagggcagtgttggccgttaaagctcctgacgttgccgctcaaaagaagattaaaaagcatgttagatcaagagaaaagcgtaaacatgaaagggatgaacatggtttttaccaaagaaagaataagaagaagagaatgtaagatatcaatgctctaaaaatgatgatataatggtgtatataattttttgtgtgattcaaagtaaaaaaagattatagatttaatattatagtacatggaaaaaataaaaatgaaggctctctcttaatgagtttatcatatttttgttttgtctggtagaactctttagtattagatttcactcgtgggtatatcagccatttcctcatcgttatcaccatcttcatctaattgagtaatctcagattccggctcacgctggtcttcttcttcttcttcatcttcttcaccttcgtcttcttccgcttcaccttcaccttcaccttcaccttcaccttcaccttcaccttcaccttcaccttcaccttcaccttcctcttcttcgtcatcatcctcatgtttcggaccttctctaccattttcaggttcatcaccttcatattcttcatcatgatcctttgcatgatcaggatcattttcattgtcatgatcattcttcattgagtatatttccatctctttttggtacctttccctatcttcagtatacaatttataataaggtttcctatcttgctcatttaaattcttccatgcttcggttaaatctttagaaacatcttgcgaaccctgttgtctaaccttttccttattcatttcacagaatagcagataagcattcgttggtcttttgggcatattcggatctctatcctttgccttttgccttttgctctttgttttctttaatggttttgttaaaagttctttcttgaaagactctaacgttggtaatgggttctcataacgtaattctggatctaaatcaactcttgattctagtctttctaaaagtacactgtactcaagtttcagtcttttaactgaaagtcttgtcctttgaataccgagtgctagaacttcattattttcctttaattcatcagctttacgtttcaaatcattatcatcagacattataccatcagattatgaagggcgccaatatctttactacaactttataattttataacgttattttcctgggaattgaaccgccaaatatggaagatccttatatctatgcaaatatcaactgggaacttagagacctttaaataatgcaattagatcctcttatattgagagaaataatatgggatagaggtggggccttttattcaaggataaacttgtcttgaattgtttggtcacaaacgtttttttcaatcttaaagctgctgtgttcttgacttcgtccgccttttcgatgttcgcacattttcgaaagagggatggaatgaattgatgatcatgatcatgacaagttaagtgcaaaatcaggaagcaacctaagttaagattaaaaagtgactcatgtccaagcaagaggaagaaccgttgttgaagcaaaccggatcgacagctaccactggtgaaaatagtaatagtaataataatactacatcaacgtctgcaaagtataagccgaagcctaagcctaggggcaatggaaccaagaacgttagcagtgaaagtggtgctgataccaatcttgaagttggtgttagacatgccgatgatgttaatggtggtggaatctacaatggtgaagtgacgcagggatcgttacgggcacctaataagcaaataagaacgggcgcacagaggacatctaggacagcacaaaaattgaaattattaccagaggaaccgtttcaacgagatgaagagagtctggatctaagagatagagatgtatattcacaggttaacaggattacggataaaccggcgagaagagatgcagaaaaattgggtaaaagtcacaggcatttactaccgagagcaactgcttattgtaccgcaagtggttattcaatgagagaattagttagatggcttaaagaatgtaaaaaaatacatcacacccatccaaaattatttgacgaatgcatatatacacctttcatgtacaatgattggaggggtgacaaaagatttgaacatgaagacgtgatcagactcgatgacgaaggtggtgatattaacgttagtgataaacaaccggatcttttcgtattcgaatacggtgttgttgttctttgggggtttacagaaagagaggaaaaggccttcttaaatgatattgaagggttcgaaaaggaaaaattagcagaagaagatgttcaaatagaggaattcaactattatgtgactcaaagctatcaaccaagaatttataacgactttatcaccctcagagatgcgtcaaattatatgataaaattatcaatttctcatgccattgctcaaagtgttaaaatttcactatttgaagaattggttgataatacaattgaagatactcaggatataccgcaagaaattgcatctagtggtaaagtttcgatgagtaaagaagacattatgaaaagtatcggtgaattattcatcctaaggataaacattaatttacatggatctgtattagattcacctgaaattatgtggtctgaaccacaactagaacccatctaccaagccacaagaggttatttggaaattaatcaacgtgtagctcttttaaatcaacggttggaggtcgtatctgatttattacagatgttgaaagaacaattgggtcattcacatgaagaatatttagaatttatcgtcattctcttggtaggtgtggaagtaatcatatctgtcgtgaatattgcagcagatatattagcatctaaattctgaccaaataaataatgtgcgcattaatatgtttacgatatattgttttttcatttaaaaaactactaaaatacaaactcagttaccaactgcaactgcaaacccgaattcatgtctttgaccttttatttcgttcttatcgaacccttatagttcctgagaagccttaccaggtttagcggtcttcttaggcaacaagttttggtgaatgttaggcaaaacaccaccttgagcaattgtcacattacccaataacttgttcaattcatcatcatttctgatagccaattgcaaatgtcttggaatgattctggtctttttgttatccctagcggcattaccagccaattccaaaatttctgcagccaaatattccaagacagcagtcatgtaaactggtgcacctgaaccaactctttgagcatagttaccctttctcaacaatctgtgaactctaccgactggaaaggtcaaacctgcctttgcagatctagattgagaagcctttgcggcagaacctgccttaccacctttaccaccagacatttttttattactttgttgatctaatacttgtgtcgagagagtaaagttggaagattttggagcatattactcaatcaattaacaacctctgaccttttatacaattacaattacgcgaaaagggttaggaagataatttacgatttatttcattattgggacgcgatagccgctagaaacattacgttgctctacgcaattcctctacgacctatttgaacgattacagttctcattttttcgcaaattgcgaaatttttggcactaacaaaaagaagacccgttcggacgttttctcaccttttactatggcaccgttctcagactttcgcgctctgtcactccatactggaaatttaaacgcgttaagtggtttttcgctctgtggtaggtagggctaggtgaagagaacgaatcgcctcttcgttactgcgcaggaggaggggatctatgccaaagagaggcgtttctcctttcttgctttcgtgtatcttttttttttctttcttctccccgttatgtcgtgttttttagttctttcttaatgtatataaaagaagcgaacaagatgatctcaaaacatctcatcctttccaactgaactgcactttagatactgtagaaagtagttaaagcaataaagaaaaatcgacatgtctgctaaagccgaaaagaagccagcctccaaggccccagctgagaagaagccagctgctaagaagaccgcatctgctgttgagtctaagggtagaaagaacaaggcaagaaaggagacctactcctcttacatttacaaggttttgaaacaaactcatccagacactggtatctctcaaaaatccatgtctattttaaactccttcgttaatgatatctttgaaagaattgctaccgaagcttctaaactagctgcttacaacagaaagtctactatctctgctagagagattcaaactgctgtaagactaattttgccgggtgaattggctaaacatgccgtgtctgaaggtactagagctgtgactaagtactcttcttctactcaggcttaaaaagagggaaagaaatgggttttttttttcttctgttactattatatttcttaagattaatttaggagtacgagtttatgttttgtaatattagggaattaaagtatagtataatatatatatatatgtttcaatgtggtttttccaacttctgaagaacggtgtcaaccttttcttgagcggtttggtgtttatcagttctggtgcctactcttagggaagattgtattctaacatagccattttcatgagctaattcatgtaactcacctatcaaagtgaacacttcatcccagggaccctcaatagtagttcccgcactgtgtaatgtacttttcagatgggattcacgaatccttctttcaacgatggtaacaaaatcagaaacgcttgcagaaccggtacctataggtaccatgcaaagatcagcaaggcagggaatctttggcatgacttcttggttcgtttgttaaaactataaaacttggtaataatgataagaatggtgatgaatttgttaattttttttctacatttatgttgatgcagttacaggggtcaggggttgcgatagaagatcgaatgttatttttggacgacaaaaagttaactaaaaaataaacatggaaaaaagttacctataatcgtgcctttaaagccagttcatcagtatatttaataaagagttcattatttttttataactatgatcatggaaacttagtagggcaattactttctccataatttagagaagtcgaatagcattgtgctatttgaaattgtgtaattgaaagtttgataagttaggatctatcgatcgatctaaataaaatactcgcctaaaaattaactttggggaatatgacaattttgtttttatcgaaagggaagaatggttgatttaactatattcagtcttctgtagcttaaaacaataaattttacacatatattgagaaaaaacaaataaacctgttaatggttcagttcctgtagtttttattccacaattcttatttagattttgattcttggagtttaatgttcgatgcccaaaattttgaatcaaacggccaacctcatatttaccattgtcatatttgtgtattttttttgtctgttcgtcagtagatcaacgaaaatgtatagaaatttaacgtcgaaagaatccaaccccaaatcttcctactaaattcaatcaaagggtatttccaaagagatatgagcagaaccttcaaggtcaaaaatatgaagagaactcctcaattaaaggacttaatgagaagcaactgtattttctaccttcaaacacaaaacaagctgaccatgctcttcaaagtattaaagtaaggaattcatcctatatcagaaggatgttcattcctaacatgcaaaactaataattctccagtaatgacttttcctgcaaaataaccttggagacgaaaatacttagacaaatggctgctcccagcagagcaaatgactggcgttagtatatcaatggttagattattccaacgcatccttaaaggaatagaagactaggaaaaaaccatgaaaaagcctaaaattccttcacttcggcggcaaaatcagcgcccacccaacttgatgtggctggaccccgacgtataaaaagcatgagcacttcaaaccagtataaaaatgctagaatcaataacaagcaagctcgagggagagagactttcgaacatctcttatctttgattcctccctctatatcttcaccatctaaattaatcttaagataatgttgatatccacatttattgcccttaaacggaaggtatacaatactgttgaacacattttctcatacaaagaaagaggtgttctctatagtaaaatccttgacatataatgctgttaacgaagaaatgggctatagacctttttcaccaacaaaatttttaattttcctttgaggatgatcatctccttcatgtaacctttctattgcttttgcatttgccttctgtaaaacctctgacttattacttgcataaagttcacccaactcaaagtcctcaggatcggagagaacggattcagcagaggccatcccaagtgtccaaatgtcaatgacttctttgttcgatgttattccgcttgagacaatcgagccactctcattgtcaaatcgattatctttgctaaattcggatggtgggaagttactgaaggttagtttcccatccaaatttcctgtttcttcgatattgaccgccaaagattcctcacatctagactttgaaagagcgctatctacgctgaaaaacaacccttgtatacgtgaattcaatgcatccaatcttgaaaaaacgtcccaagaagattgttttgtagttcctgaagtaattttccaaggtgtcccagagtgcgaacccgatatatgtgagtacgcatctaaccctttactggattcatcaaggctgttacaattaagtcctacagtactcgggggtctcataactgtatcttgaagcgtaataccatattgatctgaaacagtcaattcatcatggcctaacctgtctgcataatacatacctacctccaaaaagagatttgacttccctgaactagttggaaaatactcatgaggatctgaaggttgtatccttgatgccagtgcatttatccaagaactggatcccaaatttaggtctactttagcatccagccacgaatcattgtccatattagcaaaatactctagatccgccatgcgcgaacttctatcttcttcaaagatgggttctgtgtgctcatattgagctgagggaaaacagtgcccttctccacagcgatcgaattgcttgtttgctaccattgcagacatggaacagggatatgatagcctgtcactcaggtgcccctgctgcatgcacaacaaacttcctgttggcggctcactggaaggagccgcatgaaaaaccccttcaataatttgatcggaataatcttccctgtttcctttattacaaaacgacagtaaattctggcttgagttctggcgccccatagagtaattgaagtctgaatttgttgctttaccatccatttgattgaaagaatccatgtctttacaaagcgcagttaatcctagtgaatctccaccaatgtcttcaatattataaagcgaagtacattcggaaattagcgtcgttcgatgagtctgtctattaacacatttacggcaattaccgtcatccccattaattggtatttcttcaagttcctcatgggaaggctccttgaattcatcatgctgattatctccaaaccaagatctagagacatgtatatcgggcggcgccgaatccatattaccatcagaggatagatcatccatgtaccgatcttctttcactcccacgataggaataacagttccagggaataagggactacagttacggagttcaacaaacgattgatttaagagatgtggagtaaaaaaaaaaattgccttctcccccagcggattgcaagctaaagctgacccctccatcaatattatttttagatacacagttcgtttcttctattgatgccgagacttctgcattagaggttactttctgaagattatcaggtttcaacagcgggtcccagcaatctgtacgttgaaaatccgttccccatatttcaatttgtgagaccaaaacggttaaccatgaacaaggctggtggtcaccaattttgactttaagatcgttaatatcaccatctactgagtcgtaaatgagtgcctccacatgaggacacaaaccatcattgagtttccaacaagcgtcaatagtcggttcaaaaccacactgttttatatcaccttcaaaaaaaaggtcagctcccacagataaattggcttcttccatcaaagaggtgttgggcgcatccaaatctttgataatgttcacttcattttgtgaacaatctttagattcttcctggtcccgaaaactcaatttaagatttctagtatgcacctgaatgactgcttcctctgcatttatcctagcggtttcccttgtcttgcaacgaatggatgccattctagccgcctctttaacagcggcggatgctcttctgcgcctttcaataaaacgcattaaaaagcaggagttcaaagactcatttttagtacagatgagaagatgatcctcattaacaccatccaattggtctaagattccaccaaagctattttcgatgaaaggattcgtatttgaagtatgttctcccaagggattttgaaagatggaattagagaagactgcactcacaatagatttaaagcttacagaagaagtaaagttctcttcatcgaattcttcatatgcaccataagctgagccatttcgagatgcatgagtttcttcgaacctttgtatcctattacgttcatatctattaccggcaccttttaggaccctcgttaacccttttgtgttcttggcctccaaaggtaattcacgtgacacacatacccgctttctattaaaggtccttgacgttgttatctttgatttttgggggctctgatgaacaatttcaattctttctgaagtcttcggtggagtacatcctatcctaaaatatctttgtgcggaatcgcttaaatcttctagtgaatctctgtcatttactttaccactgtccttatagaagaagccatgatttagttgtgtgtgtgacattatttcttagattactatagctgttatatatatatgaactttggtaggcataaaaggagaataatgaaccgatgtgtaataagttagacaaataaattaaattgataaaacggatgattcaaactcaaatgggtatcgtctacgtatttaaacaattatattgttcagttaatagtatctctaagtcttaatttttttttgctgacgcaaaaacaatatatgtatatactcattacttatgtcaagtttagctgcaagattaaagagacgatggtaataaaacaaaaacaaaggtatcaaactatacacaacgctccacaaaagaccattttaaaccaaaggagaaggttctaacttcccacagaaattaagttatcaatttggcttagttcaatttacattgtctaaaatgttttttttttttttttttttttgattgtgagttttttggccgccggcgcctgaaagctgtgacgccttagaatgagccgcagagatgagaatatatcgaattttcgaaaacgatatcgttaaaaagaaataaatgacattcaaagtaagagttgtttgattttatattaaaaaaaaaaaaaaaaaaaaaaaaaaaatccataaaaatatttgagtctcaatggtaactgctttgtgagaacttctgaactaccctcggtgattctgattatttcatttcaggctcgatttgctaatttttatcttcgatattagcagcaaaaatcctaacctgcttttctctatttccgtcttcaacaacttatagcgcttattacacctaccagaaatcggcgccaaaactatgtgacattttcctgcaagaaggaagattcgtaatctttcaaggaaagaagaacagacccaaactttacttctcgaggaatgatagagaggagatcttttcttaacaaatgcgattttttgagaatgctaaatgagacttttcaactcccttcacctgaggcttgaaagtgaaatttccatccaaagtaattccaggcaagttgtagaaatggccggcaagggtgcatccacctccaaccgctcttgggatatggaacaagtgtaacgaatttccgtccttcttctctggtcatggcagattttcccttcatgttcgaagtttacagacagagtctcaccaaagactatcctacgatgttggttggttactaaatgtaactagatacaactcactgtacttgtacactacgatttccatttttggcttccctcgagctagctcaattgcattccaagaggtatgtcaagatcaattgaatacaattttccaaaacaggaccgaaatttagtaatcacagattgaagtagcttcctctggatcttagtcattgattatggttgactttgaaaagtacgaagactgttatcgctgatgttttagtgccatttccaatatatgttcctaaattcaaaggatgactattaaggatcaataatacttttgggaggaagaaataaaatgattcaggaaggtctgtggttctttaaatttaatatttaataaattacatactttattaaattgtactaatcttttactatatctaatggatccagtttcaactttaaccaaccaagtacagatcatgaaatctttaagttttcaaagcgtaccgctgttatggtatcatgagtacagaacttttattttagattttagaatcttttgcaggtctaagcactaattaaaccagcaaggtatgacacgctaaaaagtccaaagaatatacgctttatacatggattaccgagacttaaggaaattatgtattgcacttatagatgtttgataagcatgggttcatgaatggtttacaatttacgtgcgagctgcgggacacccgtcacttatgaagttttcgttcaaatgtagaaacacaattgaacagatccttctagatgaattcatagaacccttgctctttatttctcttatgatagataataaaattttatgattaaatgtgttatacaatattcaaagttgtacagatattgttttcaacgtataacattagttagatttgttgcattactatatctttgaagccgctgttattgaaaatgaatcaggtgaccaatagtataaaataataactattatatatttatattttaatcttttaaaatatataagtaaaaacaattgtatttatttcttaaattctatatattttattactaaagaaaaatagttctaatagtcgtaatgtgttatgtttccgaacagaaaaaagtggttcaaataggtgatgaatcctgaaaaacttcctgaaaaacttctggaaattatcgcttaaggaccttaatagacccatgttaaaataacaaaaaaactatgacaagtataaatcgaccaaattcgcataaaaaaatatccctataaaatcaagaatgtgtttgtagaccgtagttttttctttcatttggcctcaaactattaaaaaatggtataggaggaacacacgtagccaatgctctcttagcatgatcattcatatattgaagacccaaaacataactggcattcacccaaccaaatccttcttttgcaacgcccttaaaatcagcgccttgattaccgtactcagcattaacacgatgaggatcagtaccctttgtgacatcatacttctcgacaacaataccattgtaatcaacaaaagccttagtcataatatagagccatctgtaagcaagtcgagtagcagtacctacaaagccgtatctcgatagaccatcccaggccaaaatctggtggggagcccaaccataagggaaatcccactgtcttgatggccgtttaatagaaagaggaccacgagatctttcagtacaagctacaatgcctccgagtacttccaaatttggtattgccttttcaaccataatcgcagcctgatcttcagttgccaacccggcccaaagagcccatagagtagttgccgattcgtaagagtgtctttctttcgtcttagtattataatcgaagaaaaacccagtctcgtcatcccacatatatttcgtgataacgcttcttctcttttgcgccaaatctctccaatattgtgcgtcagtaaccgaattgtcccatgggtcgtgatacttattctcaaagaactcctcaatgatgtcggctatatctctttcatatttgaaaagcaaagagttcaaatctactgtagccagataagcacagacaccctcaaatctgtaagtagtatcatggcccgattctctcaccccacgatcatgcatgaaaaaatcatctaacttaggctcgttgaccttaccatcgttatacatcttcgcaaattcctcacgggaagcattatactttttatgataaggggctaatagagaatcaaaatgatccacttcggtttctggaggaatacccaacccaagaggatgataacatgatagtccggtttcaggatccaatcttggtgagtttacccaaacagtcctatattcttttatagcagcatggcaagctcttttgagaaaatcaatagcatcgggattattcctaccgcccatctttttgaaaacttgtaaagccatatcagtgagaaatggaggttgcgacctgcataaatagtaacttctgttagcatttaaaatttttccgtagtgttcaatttcaaaaatgaaatgttccaccattcctcttgcaacgtgcgtcttaccgccttccaaaagaccaagtgcgatcatgtacgaatcccaaccatataattcgttaaacctaccaccgggaactgcatagggataacctaccagggacaactcacctgaagaagggttaatgtgttcctccatagctaatgctaacattccaggagttctattcaacgacttgacatattcaggtgtaatatcacgaggtagatactccacttctaaactcaaagatggattcatttgagaagcctgaacgtaaaattcgtattgctcgggacaattgtaaggaacatacactcttggatttttagcaccaggtgcatctatctttgtatccagagcgatctgagcaatgttggtcaaatcaactcttctggtcaagttatcccaaaattgggtatgtattagtctagtgagtctatccactggattttcatttatacgtgcctcatctaaaactatctgattcctaccaaaactttttgcaatagtcaattcttgtaaaagatttgataacatgtaagtacctctaatattgacatatttgaatccaccagaattagctgtccccacttttattacttttggcccggtatcctcaatcgttatttggaaatttttatcagtatcttcacatgccaacaatttccctaacatttcatccacattttcaataaagaacctcctgtttcccttactacttaaataagtatcgtcttcagaaccacgtctcttgagtaattgacggtctaaactggatttggtcttaaaattcgaaacattatcaactacactcatcgtccttggtctattcatcggcttaatccctgaatatttatttggattagtctcaggcccataatagacgtctgcagttgaaaatggatcatgaaactcattcaacgaggataacctcctatgacgttgtggatttgattctgattttgcagatgacgatttcgtccccaagaacttagggttgaaatgaacggaagggtgatgctgagaagccgattcatctgatgccatagattctcttttagactttagaagatcatctaaatcacctgcatttgaaaatgtattagtctgagatgaattcaatccgtcagatgaatgtctacgagcatgttcttccaaaggagattttttgggatcaaccattctctcttagcaatagcaaatctagggtagttaatcaggatggtgattgatgatgatgatgatattgatgacaccgatgacaataaacgatgatttgtgttttaaatgtgtcaaccagaagaaacttttgacaatttagattggtttttgcttaaagtccttttccctatattggctttaatctggaaagaccgagatacaaattaaactgatacaagggaaaaatacgaattcctcttttctgcaccagcttactctttaacgccagttaccgaccgatttactatgtaaatcaaccctaaactttttagcaattcgtactagtaacactcatcgcctgtttgaagcgctatgtatgtttaggtcgtagaactcatctttaagagaggaaataaagataccacaacacctttaagatttcccgactaactaaacagtgtttaagtgccaatacatcccgtattaatttcttaatcagattcaagaagggtatggtacgacttttctaatctggctttttctgactgaaaagatgtgattagaagtggctacgaaattctgagaaaaggactcacatagtggaagagactacaaacttcggtggagagaaatttctaggtcaactattgataagattcactgagttcctattctttccattatgatcaacaaactccctcgtatagtgcgataaatactagaagccgctaacgtcgcgatcagtggcaaaaaaaagtttaaaaatcgaagaatacctcttcaacgtatgatgactttctcatacgcaacaaacggtgtggatataagagcattatattgaatatgtctgacgataagagtactacgaagcctgttgaagaaaagaagccagagactgaatctggtcctaagccaccaacttctgccgttttctctatgttcggtggtaagaaagaaaacaaaccaagtggtgaagaagaatcgaagaaagaggagaacgaagaaaagaagcctaaggaagatgacgatgaatctccagaatctccagatgtccatttcgaaccaattgttcatctagagaaagttgatgtgaaaactttggaagaagacgaagaagttctttacaaggttagagctaagttatttagatttgatggtgaagctaaagaatggaaagaaagaggtaccggtgactgtaaatttttgaagaacaagagcactggtaaagttagaattttgatgagaagagataaaacattaaaggtttgcgccaaccacatcgtggcaccagaatacgttttgaagccaaatgttggctctgacagatcatgggtttacgcatgtaccgctgatgttgcagaaggtgaaacacaggcattgacttttgccattagatttggtagtaaggaaaacgctgacaaattcaaggaagagtttgaacaagcacagaagttgaacaagaaaaactgaaataatttttagcatggaggaaaaggaccgtggttattatatgaaaccgctcttgtgtgtcaacccttttttttttttttaccattatttgcaattaactataaaatataaatatttagtaaaacttcgagaaacaataaaatataaatatttagtaaacttcgaaaaacaacaaaataattatcgttgttatttgtctaatatcaatatccatgagattttggtttcgtggttatttgatcatgcatcaatttctttaccgtctatatatggtgtgcgtattgtccagcaaacaagaaaaccctgttcgtaataatgggtaacaacaactaataatacacttcaaagatttttcttatcctctggtaaagtttccattagttcatcattatcttcaacttcatcctctaattcatgcttgacagaaaaagatttccggaatgcaaattttaataaaatccatgccatgtttagtggaccaaattcaggccacaaacgatcaattaattcaatgacaacacctttattgcttgcttgccacaacataaaatcacttagccttgaaacaccactagtccttaccaataaatccaatggtggcgaatcgccagtataaagatgtttttctaaacaaatttcattaatactgtcaatgggaacatcctctgatataagctcctttactgaatggaaaatctcctctcttcctgtataagggaaacagatgtttaaagtagcccttgtattgtttttggtcaagtctgtcgttcttttaacctctttataaatgtcctttggtaataacgtcaaatctccaataacttttacccgtataccatatttttcagccagttcacccttatccgccaattgacgaattctctcacgagccaattgcattaaattgtcaacctccagtgaacttctcttgaaattttcaatggaaaatgcaaatactgtagcagtatcaacaccagcctgatagcaaagctccaggactttactcatactcatataacctgcttcatgaccttctttgacttctatatccattttcttggcatatcgcctattaccatccataacaaaccctacatgcttaggtgctgaattggaaactttaatcacattggagaactggttcttgatccactcggatgctgagaaccatgaaagcgtcgtctccgcctccatgctcatacttatgcaaattcgacgaagtaaagtaaagaacacctattcaaagaaagaacaaaatcttcccttattttcttcaataaacctaaaactaatatacctgacaagccaacactctatgtcaacttgatagcactaatcatcacttttttttgctttttaaaatgtttctgtcaaaaagtccaaatcgatggggtttggtcggttgttttctgcgcgcactacctactgttgaaagaagggaagaaaaaaaaacaactgatgggaggtcttttcaatctaaactataaaggacgaaacagagatccactaccaaagtccccttcataatcaatgataagacgttgtatcaggtttcgcatttgtgtactgaatgctcgtcgtggtaaatcttccttttccgctgcattggcggctgtcagtaggctagtaactccctcgatcatgttgagaaatccagtatcattggtctctaacgaaatgaatacactggctaaaaacattatggcattaattggatctggtcatcctgtcttaaatagagttaccagctattatttcgaggcggagggtaagaaagttcgtccattactagtgcttttgctttcaagagcactagctgaaatacccctcgaacaaagaacgcagagcttgattgattcggttgatgtgcctgaagatccagtttactctcaacctcctaaatcattactttttgaaccccccgctaacaatttatcacctttagatatcctacacggtataaaaccattgaatccattgaccaaaggtcctgaaccaataccagaggctaactttgacaaggagagaggtattttacctaaacagagacgattagccgaaatcgtggaaatgatccacactgcttctttacttcacgatgacgtgattgatcattcagatactagaagaggtagagcaagcggtaatgtggcctttaccaataaaatggctgtccttgctggtgattttttgctgggtagagccactgtagctatttctagattaaggaatcccgaagttgtggagttgatgtccaatagcattgcaaatttagtcgaaggtgaatttatgcaattgaaaaacactgctgttgaggatatttccatcataaatcaaggtaacaagccactaccggccgcatctaagaaattgaataacgaagttcatgattaccgtgttccacgtgctgttggcgaaggcatttctcatgatcaaatgatagagactgcatttgactactatttgcacaagacttatctaaaaacagcagctctaatttccaagtcaagtagagcggcagccattctttctggtgtggatagaactgttgtagatcaatgctacgaattcggtaaagatattggtatttgtttccaattagtggacgacatgttggattttacagtatctgcaaaagatctgggtaaaccagcaggtgcagatttagaattaggtattgctactgcacctgtgctttatgcttggaaagctgatccatctttgggacccttgatccagcgtaatttctcacaaccgggtgacgtggaacaaactgctgaagcagttgctaattctaatggagtttttaagacgaaaaaattggcagagaaatacagagaccaagctttacagaatttgcgcaaggcattgccagaatctgatgctcgttcagctttagaatttttgactaatagcattttgacgagaggaaaatgaatcttgaagaagagtcctgcatatgaccacctcgttcttgtaaaaaagtctttataatcaaacatcaacttcttatctttcattccacgcagtaaattttaaattaggatacacaaatataaaacatgccataaactatttttttctaatggcttgcactattcacagattatgctggcggtaaaaaatatgcaaagagtatcgtttgtaggggaatccaaaagataagccatataatataataatgagcgattctatcatcgccacggggtgtgctcttatctttcgaattagaggttttcaacaatctatctgcaatgtaccagagatgcaatggaatgaaagttgaaatccgattaatgatttgaacgtgggcgaaaagtaagacaataatgaccaaagatgtagtgacccaaatatgtggtcttaaactgtaatatggatatatcttggaaaaataaactgatgaatacagtagaatgataatattgggtaatgcgaataggaaattgggtatattatttggagtccaatatttgagaaaaccaacgttccaataatgagattgcaaaaatccataaaaggattgcctggtaaatggacccagaatttgtgtattacaccatgaacctctctctggacaaaagatactataagggatcacatattgctgtaggacgcatgttaagaaaagaattccacctgataatagtgggaaaagaagagctttaccgtagttacgattctttaacagttgccaaaggtcaaagacgtaatagatacccaatacgatacaatttgatctgttcaaagtagccaaactaaaacagattgctgaaaacaagtagagtggaaatctggaataaagacaatcgatatgtttgggtaaagtggtaaagactgctgattgtcgagcccaaattcctaaaaacgacagagtaaacgacaatggttcagaataaattcctgttaaaaatccagcggcactactaaagataaacaaaaccgatgtcttcttagccagagatttagcatacgaacttttcaaattaccactaaaaatctttacggttaaaaaatacaggatgaatgtggccaaatagtgcaatatattatctaggacaacaccagtcttgagtaaattgtagaactcatggttaggagccagaaatcttactaaatggatccaaaactgagagaaggcaaattcatgttcaaaagctggtttaccattctccgacgccattgccttcatgaaataaacagaatcccatgctaaaagcttattccataggtgactattccaaaatttgctactatcagccacactaacaaaccttgctaacaaaagttctgtagaagtatcaaactgatccctgggcgttaataaaatcagcccatattgaactaacttacagaggataaacgtagaactcaattgacagaacatgggctgagaaggatggagaaagccagagggagaaacttcaagtttaattcagcaaacgagaaagtttcttccaatattctacgagagggtcatcggattttggaattttttcaaatcaccattagcatcaatactttcgtctttaccagttttatcgcaacacatgattttcacaagtctagcttcagccatgcgggatccactagcaaaaggcgaagttttcaaggcttggaaaccctttccattatagttaacataaagattatatatatatgcacactagtttctcaaggcgaagtcactggatacttaaggaattaattcgtttgagcaggtcttaaaggaatctcaaagtttaataaagaaagtactgttaaaataagaagatgataattgaaaaaactggattgatctatgcaagagacttctatgatggagatgatgatgtatctaatgaatcatggaagtgggcgagatggactttattcgttatatttattctagctattgtgatgttcatagtgggtgttgtgggcctcaatcgtaggagaaagcaggttggtagagctcccataagaggtacagcatggattacaccaccttcttacaggcaatcacagagggatcacgacagaagagaagacagtgagttcgtacctcaatacacggctaaggccaatgaaaatgatttaggatactatgatgaaaacggtgaattccatttaaacagtaagggcgagttttaccccccaccatcatcaccgccaccaaatgaaacttctgaagagccaagatcaaattcttctatgtcgttaacaaggcctgaaaatgcagtaactagagatcgtcataattcttcggacgtggaagcagaatttgatcgtgatttcggtagagggagacctcatacagagacattatacacagcagctactaataattctagttcagtggaaaaacaacatatttctactccagaaagagctaaaatggctgaaagctgattcaccaagaattttgactgctgcctatttttgattttattcttaaaggattggctaatacctcattattattattacgaaagcggttaattgttcttgcaattgagtggcgattaattaataacaagagacggctagttgtaaaatttcctcctttccgttttaattctttacggtcttttaatttgtattattacaatagcggtggaggacaacatacattatagcatatcgggatttggttaataatatttgtgtttgtttgtttttttttttgtttttttaaattactgacgtttgaatagatcccttattgaatgggatactatggtgggtcctacttatcgtttacatacaacgttttttccttagttttcgttctttgatatttcatataatttttgcaacttctataattttcatcttttgctagaattgatcataatgaaggggagaaactgattaatgtttaaaggtttccgcgcggaagtaacttcttaagactagaaagatttcgattgggcctccttactatcattatttaaagggcgtgggagtagcgatcgttcacttgtccctagatgtgagtatcgaatgtaccgctaagtaatcaaaagatgtcgtcccctcaacctatcttacaaagaaaagatttaattagagattctgcctatatcaatggactgtgggtcaaagaatctgaacaacattttgatgttactgatccagctacgaaccaggtaattgcacaattaccagatcaatctgtatctgctgtcaatgatgccattgatgctgcatatgaagcattccatacttacaaaaacactacacctagacaaagagctatttggttgagaaacttttacaatttgatgttagaaaatattaatgacttgggacagatattgacttgggaaaatggtaaagccctggcagattctgtaggtgaaataaggtatgcagcatcatacttcgaatggtacgcggaggaagctcctagagtttatggtacagtaattcaacctggtaatgctggaaatagggctttcactataaaacaacctatcggtgtttgtgggttgatatgtccatggaatttccccagcgctatgattaccaggaaggcggctgcagccttggctgcaggttgtacagtagtgataaaaccagatgctcaaacccccctttccgctcttgcattagcggctctagcagaggaagctggtttccctaagggagcatttaacgtggttttggctgataagaatacaccacaagttggggttacattatgcgaatctcctaaagttaaaaaggtctcctttacgggatctacaagagtaggtaaattgttgatgaaacaggcttccactactatgaagaaattatcctttgaattgggcggtaatgctccattcatcgtttttgaaaatgccgatttagatcacgctgtagatcaagcaattgcatcgaaatttagaggattgggtcagacttgtgtatgtgccaacaggttatatgtgcaagagagtgtcgttgataaatttgcggaattgatggcggcaaaagttcgtcagttcgtccttggacatggtcttcatagtgatactactcatggatgtatgatcaatggacaagctatagaaaaggtggaagaacataaaaaagatgctattgagaagggtgctaaaattgttttagaaggtggtccactaaaagaattaggtccacacttttacaatccagcaattgtatctcatgttcctcaatctgctaaggtttctaaagaagaaactttcggacctttatgcccaatctttaccttcaaaaccaccgaagaagtggtcaaatatgccaatgatacggacgtcggtttagcatcttacgttttttccagagatatcaatactatttacactgtctcagaggccctagaagttggtatggtttcttgcaacactgggcttttctcagacgctacgatcccatttggtggtgttaaagaatctggttttggcagagaaggttctctgtatggacttgatgattacactgtggtcaaggttgtcaccattggtggcttacctaataagatctagatgctacggattttccacgaattatgtagatgaactattgaaataaaatatatgtaacgacaagaaatgcttggctttatgttggtgaaatttctatggtctccattactttggcttagttcgccctggagctcgggaggcccgaaaaccattgaatgtttaatcatgaatgaataatcaaaagtagaaaggaaactcacctaaggtcacagagatttcagctagtctatgcgactgacttatggatctttatgatgagctccctcaaagttcactgctctgtgacgaagaattcacttctttgttagatgcctgtaaaaaatatcaggtatcagtagtcgactttctcacactcccgtctaaagaattggcaagacagcttcaaaggtcaacaaatgaggtagataagttccaaaaatcaatgatcgcagagtatgatgatcaattgatgaattttaacgaggtgaaacccattagtgaagtggaaggaccggtaccattcactacaactgatgttggcattgatgaggcccttggaggaggtatttatacacatggtattacagaagtttttggcgaaagctctactggtaagtcccaattacttatgcaattgtgcttgagcgttcaattgcctacaaatatgggaggaattaaaggtaaatgcgtttatatttctactgaaggtgatttacccacacaaagactggcatctatgatttcagcaagagaggagttggttaaacatggagtctcacaggaaaatgtttatacagtcacttgttgtgatttaattaatcaagatcatattctcaatgttcaattgccgattcttttagagaatagtagaggcgccatcaagttaataatcattgattctatctctcatcatatgcgagttgaacttcctactagagactttaaggatcatcaagacaacaggttttatgttgatcaagtagccgagagattacttgatctagccaacaaacacgctttagcggttgtggttgccaaccaagttagtgatagaccattgttcgaaagtccagagccttatgttgctgaattaacagattatgagtaccaattggggtggtgggtaggttggaggaattcttccataatttatcatcaaaaatataacgaacctaagaatgttaattcagattaccaagataatgaagatctgttatcagatgatgaagatggaaagttgattcatgatgaaatagcaagggtcgaaaatttgtcaaggacgaaggcagccaaagtaacagttgcaaatagcgagaaggcattgccgccggataaaagacctatcgaaagaagatcaacattcccttccaataagcaaagatttcacaaaaagagaagtgtagatagaagggtgcctaatttaggtttgaattgggctaaacatctcagtagtagaattttactgagtaaatcctatagggcatcaccaatgattaggagaggtgagttgcatctttataaaggatctgatcctacaactttttggcaggtcaagaggctctttaaagttgttttttcggcgtatgcagattccaaggaaattccatttatgatcacaaaaagaggtttggaaagttcattaggtgatgattgatagacaacttaaccgctgcggtgataataacaatgaccataataataacaaattatgtatgtacatacatcttcaagtaataacgttacaattaaaggttatgtatctcaagatcgaaataacccaaggacatgagcatataagcaattcatcgccttctttcatgtatctcgcatacttatcagaaacaaaacaagaattaggataagattataataacacacaagacaaccaaaaaaaaaaaaaaaaaaaaaaaaaaaaaaaaaaggaaaaaaataataatcacaatgtcaatttcatttcgttagcttgtaacctccacagcatcatctgcatcatcttcgattgcattctcatcataaaccaaatcgtattcaccttcatagtccgccgcttcatcgtcaatcactgttctcctcttctgatttaacttttccctctcttcatcttcattgacattcccttctgttggagattctagtctagatgagattaggtataagtaagccactcttttcctctttttattgaaaaggaaaaatacaaggctccaaaggtatcctggttcatcatctaaaaatgatctaggcggactgtactgatatattacgcaatctggcatatccaaatgagaatttattatctcccacatccattcttcagggtttttccccaaggaataaagggaattttcaaattttgatatcatcgatttcaatgaaatcttcaaaaaatctgttggttccaaagatgagaaatcatgatctggaaaagaagcatttaaaattgcaatcaaataggcaaaagttcttctgctagcagtttcattaattggaccaaaaggtccaatatttatactattggctggatcattaactgctgaagatctccttctgttgattgctgatttacttggttgtaggcctgtactactactcgttcttctgtttgcataaaatgaacgaggattagaattagaattagaatcccctggcgaaggggaactcatataacgggattcagaattggaaaccaattcttttaaattttgatcgttcaatttattggtcttaacaccactattaggtgaaaaacttgcagatggtgatccattttcattaacagacatacgtcttttttgctcccaaaatgaatcttttgtccaagaatttgaaattgaatttgaattgggatgttgaatttgatttatttcaccagaaatcggtgataacgagccacttgattctaaacttgcatgttgccgcaaagctgcgttgtacccttcattctcttgtagaagagttcctaaatgatcatcaattcttttataaagtttcttatcagacgcaactggtttagtggtaaaaatatcacaaccaccagttatcctacaatcactagtttcaaaattaagggtttggttaaccctttcaacgtctaactcgtcgataaactaatgataattataagtgttagtaatgggaagggaaacagaaacaaacacattattaaagaacaatacctcaacataccttcattttcaatgaccagtgacctgtttattatgaaaatatgatatgactcaactgtctaaacaaaaactataaaagcttgtggttctttatattgaccgattggtgaattaattgtagtcaattgcgattagacatgattagggtccacgttgctccctgtaaacgcgaataaggcctttgttaaaaaaaaaaagacgcgtccgggtgacataaacgaaaatatttattgttatcattattattattattattattatcatcattattagtgtaaatattataatagtacaatctttgaataaaaggtaatgatgggctaggagtgactacctccaagttaaagtagtattaagacattgaagaacccatgataaaagaaaaaaagtataataatgaaatatatcaaaacaaaattggtttaattgtagtaatgtctctcgttctcttctattcaataattttttgccatttggatatatttatccttgtagatccattctgctccaattagatgagcaccccttttctctgcaattctaaaccatgcagctgctcttgccaaatccttccgccttacgctagatttctttgaccaaatggtaccactcaaacacatggcatctaaatgacccattgatgccactttttctaaaaattttaaacctttaatttcgtcctcatgatccatcccataaccttttagataagagatagcacattcgtaaatggcaggtgctgatggctcaggagcaatttctggaatagattgattacgttctaattcaaacggatttatttcaacttcaaatacatcgtgtaattcagattttaagcctgtagctgtaaacaagtagtggaaagattcttcttggtctggaatcacaccatatccatgtctcaaagccataccataaaggaaacatgcttctgcgtttccgtcattacaagcatcatgaagttttcttgcagattcacctaaattggcaatgttagttctcttactatgaagcgaaggtgatgaatgaattgccgatcctgcagcatcatgaattcgatcttcattattattattgttagtgctattgttattgttattatcactagttaagggggtgtcaaaacgagatactcgaccggcgttatgtctactgtccaatgataattttctatttcttaaacctggtgtgaatggctgtgtgttagcattggtaatcgttgggattgaacttgatttattaatagcatgatgatctgataaagatctgtaatgttgggtatctctagtctgcatccgtgaaccttgttttgctgaggaggatgatgaggacagtgatgatggtatgtcttcaagtggttctgtagtattagttgggaaagcaaatttacgaaacaacggagatttgtttgcattattaagaaagggtgtaccctttggtggagaattagcagccgatgtaccaacacttgtggtagcggaagtatttgctgaattcattgccgacatctcagctaaatcatctgtacttcttttagaattcaaagagtcttttcttcctgaagccttttgtgatctaaacaaattctttaagtggaatgaagttttcttcttactatgactacgtccatttccatccttcgttggggtattcttagttggagtgtccctcgttagagtagctttcgttggagtttctttattggagttttgtagactatcaccgccatctgatttataactggtcgcagtattaaaaatgtgtaacggacttgcggtagtagaatctttaccactactaacttttgttgtagctgatgaattattacgcttcacacttgatccatctatggaaccttcactctcatctgatagagattgttgagatctaaatagcaaagaattttgaccaaattctgttgatgaactgttattactgttattttcatacaactttgcctttttagaggatggtgactttgacaaaagctttgaagtatccatacgatatttttcgaaattaaccgttttacgactcgtacttctacttacaggtgcagtttcagtagccgttgtattcgatctttgaattggggcaacaccgacattaaatgcaccataaatctcggctctaactgttttcttccgagggtttgtacctaatgatggtttcttaggtcttggtgaaggttgattatcatgagtatcattgtcttcatcttcggaatcaacttcttccacaaaataggaatatcttgattttgttggtagatgttgttctgcacctgtacataaacctttatcgccttgtcccaatggatctgctactgaaactgtaagaactcttctcggcgtaacaaaagacctgttcttcaaagatgggaatcctgatgcaggtaaacataacaaaggactttgttccctttctttctctctttctctttgcctttctgcgtctgcctcttcatccttttccctttgaagtactctgtttctctccttctcctcggcttcatttttttctctttcttccttcaatgccaactgtaacaacctctcatcttctgcacttaattctaacttgtccaacagtctttctgcagtttgtacactttgaaatgaaaccacgcttgagtgtcttccactttcgtactgataaagtgacagaatttctaatggatccgtatccatgactactaaacctagcaactggtattaacagaaaaaaacaacgatgtttgcttctttcttaccttccactttgatggcctgccagtacagcgaaaggatttatttttttttttttattgatgaaatgtaagaaagagacagatagatagatagatagaggctatctattgcaatagtattggtaggatacgcagtaccagactatatttgttgatttttcgatctcctggaagacaagatcttaagtaatagtaaatggcgtttatacactattactttttatacgaagatctgaagccgtattctttgaagaatgcaaacgcgtcaatgcatcactaccggcttttctacgtgccgcaccatagtggaaacatgtccccttcgaggaattcgcgtagcgccaatgcatagagaatttcgcacccgaagctgctttccatagtagaacacagagatattgcacaaggattatagtattgagagtaataagaaagagataactccagagaacttgttatattgtacatatacttatagatctcagcatgtgttaaccctgtaatataaaatagggcggtcattagtcgtagcagtagtcgtattccaacagaaataaagtaaaaggaagtaaaaacaaaaaaaaaaaattcgattgcaaaatatactttaaaaacttgactctctaaaaaacccttgaccccaattgatcgcttatagcgtccatgtagtgagcgccaaatacagaccagtggaaattaaccacagcgtatagatgacgcaaaacgctatcgaattcttccatatctaaaccctgtagagttgttgttgttgctgtaccgaatgtagatgctgtggtattatgagaatttgatgatgtagtagatgcattggtattattgttggtgtcattagtatttgatgatgatgatgatgatgatgcagcagatgtgttttctccagttggtacaagtaggccattagatgtggctgcagatgtagtggctgctgctgtagctgaggtgttagtaattgtagaatccttgttgagagtactgcatagatagacgaaatcttgtctaacacgaccgtcaactgtacagtcagatttggaaaatattaactcttccagtgaacggaatacacgatcttctaaaacgccataaacttcacttaaaggctgggtctgtttcgataaccaagatttggcaaaattaactttagcttgcgctaatgctggtgtactggaaggtggtgtgccagtggtattggaagacgaactaataccgactccggtttgtactctgcgagatagatactcgtctctgaggtctgtaatcgtcttacacaaatgaatggcaattgccattgtgtttttagtccatctacaattaccatgttcgtctgtgataatgctaacgatttctccctttaatttcttttgagtaccactcgagtcgatataattcttggcacctttatccaacgaagtatcgttggcaactagttgtttgaataaaagtctgcagattaaaagacaaacaatttgtcgtatatctgctcttaatagaatgagtctggcatgatcaaatgataatgatgttggatattctctcaccatcttacgacacgataatagactaatgatactccgaatgcataatttgtaaacgtcccttggtactgcacgatctctttgtatggtaccttggttgacactttcgttaaattttctattgaaccaaagtaatgatgatttaagatcaacacgatctgaattcattaaggattggaaatactgtttttcaaattcgacagaattggataatagggcaggccttagaatgcgtatttggtggttggcaatatctaatttcattgcctccaaaatttgaaatacaagccttaaaccttcaattaatttggataacgatgattcttgttcagcttctttgaatttggcgctcattctatcgacccacgcgtctctcattggtgcacaatgatgtttaaacaattgagccaaccattctgaaagatttgtcattattaatgatcctcttagcaattcttgaacgttcaactccgtatctaatacgttgtgtatcacgtgtgcttcgcgttgaggtactatggtcaataaaacttctcttaaagtgtcaaaaaggggcactaatctagtatgatcatattggaaaacttgaggtttctgagaataaacatacacttcgttttccacatctctccagtacctatcagataactgtttctttttaagacctctttcaccatctaaatttggtctaaattgtagcagaggatcaaaaataatatcatgtctcaattgtggatttttcacaatttcttgtaaatcgatttctttaaggcattgtaaattgattggaggtaacggtaaaggtcctggatggtctctaacggcgcttatcctctcatgtaaagtcaattcgtcatatttcgtcactaaaggttgttgtgcttggtggcataacaaaatcgcatctcttagggcattagttgacatagaatggtttttactttgatgatgagaacgatgcaatgatggagttgtcgatgattttccaacgtttgaacctacattaccctcattcgtgactgagcctgtagttacaccagaacttgcggtagaagttgctgccgctcctgctgctgcgggctgctttggatcattaccaaaactggtagcacctgtatcattaccacttgaggcaccattcacacacctactactttcacgagatgaagctcctgagctattaccgctatctgtggaacttgcagttgaagcggtggcaccgctaccgttggaaaatgcagcttgaacaaagcaatagggagaatgctgatgacggcggtgatgatgatgatgatgaggtttcccagatcttttctttctaactgaacctacagccgactgctggttattatgatgacgataatggtaatggttgtggttctgacagtatgacgccgttaatctttttaaagaggaatggcaaatagctggtactgaatgagatctgaatttgttatcacttttaccaaatagtcttctaactcccaaatcttccttggctaaaaatggatcctttcttaaaaattgtcccgttctatgatcaaactgtttaaacaatccattacccatactatcttcgttttcctcttcatttactccttcggctctaccatcatccccatcattttcgctgttactttgaacttcttttccttcttctccaacatcttcttgctcttcttcgtcgttgacatcaatgtcgacaccgccttcatctattccaccatcatcctcattagggaagtggttgccaatcgatgagactagttctgtatattttcttaccaataatgatcctgtgggctggaaactagcttgtgtcgttgtatcacctggtccatgttcctgagaacaggtggaaagtctcttacgatcttctgtattgtttgatgaggtattccctccctcttcattagtattcatattcattccgtgttgatcctttggtgaacttgttgttttagctatatctgtctgttgaggtatcgttgctgttgttgttctagtagtagtaccagtagtagacaaacttctatttctcgtgcttgttgtctgtggttctgacgatgctgtagctatcgtagatctatgtggccttgcttgttccatataactataagccacttggatattcttattaatataatcttcttctctatctatcagtcgcttgctttgttgctttcgttctttctctctcttttcctttctctcttgttcccccttcaaatgtgaatgaaactacactgtacactccttgtcaagtcttacaaattgatgagaattgtaaagatgatctctcagtggcggtaggaacccactatacttggataacaatgataagtaatagcagaaagaaacaatattagatgctaaactggctgtttctcttctttttgtctttcttcctctctttatttccttctaagtatgaaaaacaaccttgatgagtaaagtaggaagcaagggaggaaagtgcgaaaagaactttattgatttgattcacactttcacacagtccaaatcaagcgcaattcttgcaaaatgaatgacaaaaaatagaagagtaaattccaatcagtttcaagaattcgaagccgatgctagcgacgtttatgtttctaacgcttctaatgctgcaacggtatgttgaaaaaaagaaaaagttttctttttctttgctcgctttatccacttgctaaaactagcacagaaatcgcgataaaatagtaaaatgttaatagcacttaaggcggaactggatatgcaggaaagtagaagcaatgacatatgtatagtaaatgagtacaagacaaaagatgtcacaattacagttgcataattacacagggttccagcagctcgcggggttgcagctgtagttgtagtgtcggtcgcagctaagcaaaaaaaagacataacattcggaaatagagggaccgcagcaagaagaaacgggagatggtcggaattaacagagaaagaaggacccttattgctgtagaggttcttcaagaaaagaggttctataaaagatagcctcaaatgtgacatgcacgttgaaagtgattgtcatgtccctgggatcgaattagtttacaatagtttagcatagtataggttgatcgcaggtcaggcaagaacgagaaaatgaccataaatacttgcgtactatattaaccctgttgtaaacatttcagtctcacttgactcttctgaaagcttatagttgtccctgtggctggttcttcgaatcagaaaaagaaacgatgaaaccggaaagaagaatatttgcggggcatagccaacaagagtgcgtagtggatctggatccttgattgttctgtacgaaaaaactccgagctttagaatgcggtcacacgctaagaaagaatatagtgcacattcttggaagcgacccttttcactgttacccggaatacatgacgtcagacagaattaattgaaagtcagatgacttttgtggcactgtgcatctcgaccacattttctctttccttttttttctaatactttatttcttgttttcgtagacccaaaattcattactactacataataatactataatataatatacaacctgcgctttaaaagaaattaaaccgataataatataacaaaagtggcagcgtttttcttaaccaccgaaaccataaagggttctaccttgtctctttagagcgtagacaacatccaaagaagtaacggtctttctcttggcgtgttcagtgtaagtaacagcatccctgataacggattctaagaacgtctttaggacggctctcacttcttcgtagatcaaaccagagatacgcttaacaccacctcttcttgctaatcttctaatagcaggcttagtgataccttgaatgttatctctaagaatctttctgtgacgcttagcaccaccttttcctagacctttaccaccttttcctctaccggacattttgttttgttttgttttgttcttgtttgtttctgatgggataagagacaagtatcaaagcgaaaatttctttctagtaaatggtaccaattggtctcttttatatcattttccccctgttgaatacccatactatctcaatccatgtggtaccgtggtttcgcgcccgatagaagagtgtgaaactctgagaacgggtcttctatagtgaagtgcgaaaatcgggttacgaattgggaagcggttttcgcagtacccggcccgtgctcagaatttctcatctcgcccgtaataaaccatgatacaagtttcgcacaaggtacaccgcgtaactcagatggggtgaaacaggaattgcggtggcgttgtaacaaggggggcaaccaaagaagcggtgtaatgtgcactgggtcgtaaaaaaaattttcctatataaacggggcttttaaaacatattagctcctcttctcttacatttactacaaagacaacatcaacacatacaaaataaatcaagatggcaagaaccaagcaaacagccagaaagtctactggtggtaaggccccaagaaagcaacttgcctctaaggcagcaagaaagtcagcaccatccaccggtggtgttaagaagcctcacagatataagccaggtaccgttgccttgagagaaattagaagatttcagaaatctactgaacttttgatcagaaagttaccatttcaaagattggttagagaaattgctcaagatttcaagaccgatttgagattccaatcttctgctattggtgctttgcaagaatctgtcgaagcatacctagtgtctctatttgaagataccaacttggctgctattcacgccaagcgtgtcactattcaaaagaaggacatcaagttggctagaagactaagaggtgaaagatcttgaatacgttttcttttgagttttttctctttgtgtactatatttgattacgttatattactatatatatatgtgtttgttttaatggttatggattaagcgttatgtgataaaatgttagttaatgttaagaagacaaaagcaatgagcaaaatggttgttaagatttgtggactgcagagtgttgaagctgctcaagtagctatcgataatggtgctgatttattaggtgtcatatgtgtacctaacagaaagagaacagttgatgctgaagttgctaaatctatttctaatctttgccgtagtaagaatgtcaaattagtcggtgtatttagaaaccaatcaaaggaagacgttgcaaagattgctcaagattacaatttgaacgttgttcagctacacggtgatgaagactggaaagaatatgattcgtttattccattaccgattattaaaagattagttttccctcgagacgtcgaaattttatcacagttacaaaatacagattgtcaaccactatttgattctgaagccggtggtactggtgagaaattagattggcaatctattggcaaatggtattctgatgctaacttgtctaatggttacatactggcaggcggattgaaccctgataatgttagagatgcattaaaaatcccaggcgtcattggtgtcgatgtcagcggtggtgttgagagtgatggtatgaaggataatgaaaagattaaaacgtttctatttaacgctcattcattgtaaatatagtagtaattaattgattgattgattaattaattaattaattaattatatttaagcggaaccagagatgaagaaccacttgtcaatagacttgtcaactggagcatcttcttgtggagaagctgctggaacttcagaagcagcggtagctgagtaagttggggaatcggtaacagtagtgttagtcaatgcaatacccttgttgtcggaaaccttaccgtgaatcaattgtttccaagattcgtgggtttctctaacgatgtcaagagcgtatttcttgtttttagcttcaccagagaatgcaaattggttttctggcttaccatctggaattttgtaaattctgaaccattcgttagtagctctcaatagacctgggaagtatttttcgacgtcttcaacatcgttcaactttggagccaatggatcgttaacatcgatagcaataaccttccagtcagtttcaccttcatccaaaagagccatgataccaagaactttaacttgtttaacttgaccagtgtaaccaatggtttcaccaatttccaaaacatcaactgggtcgttgtcaccaacagccttagtttctgggtggacgacatttggatcttcccaagtttgtgggaaggcaccgtagttgtgaatgtaaccgtggtgtgggaaacagtttctaacgtatctcaatttacccttcttggtgtcttgaataattgggttcaatggttcttccttggtgatttccaacttaccgttagtccaacgtggaatttccacaaccatgttaaagatttgtttctcttcatcggcgtaaagtgggatgtcgtggaatggagaaacgggcttaccgttcttttccaaaaagactttgtagtcaagagtgttcttggcaccgacttgtcttggggtgtaactcattttatgtgctttgagtgtatatgtttgtttcgacggacggtagttcaggaaacttgttcaattgaattgatcgatcaattcgttccttatatatgtttgtctttttttttttcaagattggacgaacataaggtttcgctagaaattaaagcaggcaaattttcaagaaatctaaggtcaagattgattaagcatacttttggcccaattacattccatttgagtgttgaatctgatcctcttattatggatcttctcttggaatcgtttaaaaattggaccacgtgtagttttatgtggcgctgacttttccatagtgaagtagtcattaaatcaaaaaggttttcacgagtattagcttctatggccaagttggtaaggcgccacactagtaatgtggagatcatcagttcgaatctggttggaagcattttttgtattaaacttatttttttagaaagttgacactactacaaactatactgcatgaatttcagtttccagtactaattgcgtgttttcacttgttcataactctactttggagctttaccctttttgttttattatggaattgcattgtttgttaacaaaacgtgaagttagtgtagtacatagagaaagatatgtaccaggaacaccgtaatatattccatttggtaaatatacatgaacaaatatatataaccccatactcattatcccaaaattaaatctctaatgctacaatatataattacgtatatgctcgtattcccgttaccttactactaaaccttgatccataataacgtctccctgatcgtcaacttcagcttgatcttgttgagccattgctctttcaattgcttcttcatcatcttcgtcagcaaattcacctgcagtattagttctcttcctcaactgtagctctttaaatttttccaattgcgaatcgttaatagctaatcctctcttcaattggaatagctgcctacacataggacatagtccttttgatgttgtagtgtccaaccacctgtagatacagtgaacgtggaaattatggttacattcaccaacaactaatgagcattcatctcccggatacttacaactaggacaagttgcattataacttgccctgcaaatcccacaaacatcatcgtcatcatcagcttccaaggatccatccttgttgtcctttgggatatgccacgtccatgcaaagacactgtgtacttcttcaatgtcaactttcatcgattttgtgtagtttcttatttagtgcagcttagtgtagtgtactccagcgttaacgtcactttacaaacatgtacatagcatatatgttgaacaagttgaatgaataataatagtgaaaaaaaaaaaaaaaagccattacaaaaaagggttactaaaaacgatattagttgttcgaaggtctgtcgagttgcaagacggtaaaagtaccctgactccaatctttgaaagacgacaatagtttaccttcattatgaagtgatctaaattcatcattaccacctcttgatttaccattgattattacatttggaacagttgatctaccagtcttttgttccacatacttctgtagttctgctccgttatgatgcctgtccagttcaatgacgaaatatgatggtgtgaacgaatattccttgtctaataattcctttagttttttcgagtaaggacaagtagacttgctgaaaacaattattggagaaaagtctaaaatcattgcatattcctttactgggtcgaattcggtttgttgtgcatgttcacttgctgagccacctttaccaacaacaccaccaccactaattgatccactactgcctgtctccaaatcatcggtttttccaataccaacctcttgtttaatcttaccaatttctgcatccaccacagagtcaccttcaggttgcttttccttagccttttgcttttcagtaactacctcctccttggactccttattgatactcgtgccagctgaagtcagagtttgatcttcattagaattagcatttgctagtgatgacgattctcctattgaaacagagttggcattttgtacaacgaaaaatactaataataatagaagagaagtaatgcttaaaactcttaaattacgtttattcagtgtaacccccatgattgtgtcttagtctttggatgtgtgagagggagaaaagtcctatacggtatgtcagcgacagctttaactatgtcagcttaatcttggcactttttttcaaaagatataaagcgttgatcttgttttggtttgattttaaaaaggttcgaagttcagaagaagggcattgctgatgaaaaatttcaacgcgaaagaacccaaatacgtcaagactcatcgcaaaataaccttaagtttatatttagaacagcgtggataaacaaattgtaacaaaatgatgatgcgatactattaactattacttactgatagcttgttgatgagttgataataagaattctcttctttttgaaatgtaatcgcacatctcttggtgctcttgttttgattgtattttctccgataagtatttgaaatttaccttatcaaggcacacgaatttatgaatactatcgatggctgatagttctaaatcatagttgttaatcttttccaatgaggtgtaggaacggaaatgtttaccatcttgaaccaactcgttctgagtccaaagtccatatggatcaaattttggtgcatgagaatgggcaaacataacgtcacattcttttagagcggagttttcggatccaaagaaagttttgtaaaaattatccagggagtaaagtttatcgtatttgattgattttgcggttttaccaccgtatttggcttcaattgcgtctgccgcagcttgataacgcaaataatcttgatttaaatcgtgttgtaacatggcaacaccacggaaaccttcattattggctctgtgataaccttcaacacctgtagcagtcttcacttggtagaatggcaatccgtagaaattagctgcagctaagaaagtttccttatcaccttcaccagcagctctttgtgaaaacataggataataccacgatggaccgttaacgttgtagtataacgctaataaaatcgttggtaaatgagtggatttggaaatcatcaattgaccagattctgttgaaacatctggaatagtaccttcaaaatcatggaatggaatatcatccatcgatttcgtatttttggtgtagacttcaggtggtgttaagtcatcaaaacagttacgaatacgcttacgtctgttgacagtgatatcagcaatgtcgtaatagattggttgagttgttctacgccaaaaatctggccacaaaacaaatccagtagttttgtaaggtgctaaatcaaaaacatcatttagtcgtttgactgggaaattatcagcatccaaaaataagacatcttcgaaacttgatgcgatcaatgataatgatttaaattgataaccagtaaattgggaattggcaataacgtttggcggcagaacatcagaaaggtaaacacatttagcgttgtattgaggtaaaatttcatcacaaaattggttttcacccaaatcacttggtggaatgaaaacttctactggtaatgtagtccctaattcacgcattgaacgaatcaccagcaacgccaatagagagaatttaccaccacctactgtaacaatacctttacccttatagacattcttaggcagccttagggaaccaagcacatcaacataagctgcatggtttttcttcagcatagtgacctcctcgggactaatttctaaacaattttccaagctgtcatgtgccaatgtaggccattcatcataattttcaggacgaaatccgatatcaccatgtaatggacaatcttctttgtaaattctctgactctttccctctggtgagaaattcttcaaatgcgtgaatacctcctcataaaatctcttcaatttcgcagtactgtctggccccaaagtagatgattgtgttgaagcatgatcttgcgtatgttgttgatctactgcttgttgatccgacccaactccttgccttaatgcagctgcagcatcagacccatgagcagctacactatttaaagcatgttccaattgacccccggataaatattttcttagatactcttctgcagcggcatgatcaccgttatatcttgtagtaccgaggaaaaccaaacaaaccaacagccccagcagtgccaatcttaaggctttaccgtaacgtcttgtcactaaaggcattatccctgcagatacaagactgttttattgaaaacgcggagaagaaaaaaccagactaaaaagactaagtattcaaaaatcgaatctaattaatccacactagaaaaaaatgcacaaaaggtttcaatgacaaacttccataagcagacctcccttaacctttttccctgccaatcaattgttgccaagatttgtgcattgttaattgtagttgtttgaggtaccgaagagccagcgtgtgtgataaaaaaacattgtcatgacgaacggacgatttgtagcttggattcagcagaaatatacagaatgcgcaggttcaatggcggctagttcaccatattgcaactgcacatcttggttttcgactcttgactcacattggacttgcttccctttgagagggcactgtgagttgtgcacgtttggcaatggcgcttgacacgaaacgtttattagtcgtttgcatgcccagagttcgcaaagagtagatgggacaggtcttgctgatacaagctgctctggcagtatatactgatttcaaaagcagtagaagcggtcattgggagtctattacagagtgcccgttggcgagcgtcacgtgatacactatttacaggcatcggtggtgaaagtgaggaagtaagggcttgtttggtggttaaacatgatcaaacatccctatatggtacacaacaaatgagaataactgcagctcaacaagcgccggtatcagtggaaaagtcacgtgaccacatatgatattcccacctcctgtattacacccgagtaggcatcagattcctaactggagaggttacaaacaaggcccagaaactgcgcccctttctattgcaactaagtcattactgtactatacacaacacatcacgttcaacgaagatatgaaacctcgagacaagagaatttaaagctgtagagataacaatagtaatagtaatcgcactagtaatagtaatagtggtaataggagtatcgatatctacataaattctgatcttttcctagatgtcagcccaagaatattacggtgatagcaaggcttcagtatgttcgattctaaaggcaatcaggtgatataagatgtcatgtaacccaagatcaatatactaacaaataccttccttccaaacagtacagtcgtccacaaggtccacccccaagtagtgattattatggtggtgcttcaagaggctatccgcaaggcggcggcggcggcggcggcggatactatcagcagccaccccaacaacactaccaacaaccaccaccacaatacactcaaccaggctaccacggcggcggtggatatccccaacaaggtgctccccatcaaggtggttacggtggtggtcagcagcccatctacgttcaacagcagcctccacaaaggggtaatgaagattgtctgacagcatgtctggcggtgttatgtgtttgttgtacactagacatgttgttctaatgaagttaatgctttacaatgagattccatccattccctgtacttatggggtaaaaacaatacccacctccagattgtaatatcgttcactatcctgctcctagtactactctttaactgatacggtggcttttattgtcgttactacgtcattactatgtagatgcaagtaaagtaaaataaaacagtatatactatatatacatatctttgttctttgttctttttttttttttttttgttcaaaagaatgcctctctcattttccctcttgtgcgaattggtgatttacatcccttagcagggcagatcttcggaccatagttatcaggatgcgcagaaccttttagctgagccaacttcctctttgccattctagatttacctctagcgttatctattcgagcaaaacaccttccgcagtaagtatgaccgcatggcgccacaaacgtacgtcttgaaagatccctatccaattgtgatggtctcgctaaagtttgatagggacaatgaaactgatatttgtaaaccaaacattcaaaagaaacacccctatccatttttgtaatcccttcaaattcatcaggaattcctacacccaattcaactccacataaggtacaaacggggacttcttgccattggtctgagaccgaatcatctttaactacaacagtttcttccttaccatctcgtacaatgtctagttttatcttaggttcggtatcaaaggacgcactatatccatcaggtaattccattgctctctgtacatatgactgttgttgatcttgtgtcttttccatatattttttcgtcctactatcatgctctctttcttctctttcttgaatcatgctaacaatactctgcgtactttcttcctcatccatatcaccgacatatccattgtataaccatgctgcatcattagatcccataccatttgcattcatcaggatatagttggctaaactttcaccgaatccaccgccaacgcccatatgtattctgaaatgccttctgttatgccataaacgtctctgtctttcgtgattttcttcattcaaacgacgtgattcctgttgattcgattgaactctattcgttgcccagttttgcaccattcggctacggtattctgtgaaaagcggtaccagttcattatcacattcttgtaacgttaaaggtgccacactttgtaagattgatctaaactcatataatgactgtgcgtgaacgaatgcgctcctcacatctggcggaaaagaatctattctctctcttaaccgcattaaaaccggatttccctgcatagcatctgaacgcatttgatcacgtctacgagtaatatttcgtaatctagatctctcctcttcttgacgccgtagttgcaaaacgctgggcggaagacgtccattttcaacagtaccatttccactatcatcatcatcatcatctgatgtgtgaaacaacaatctgctcgctcgcctagcgcttctctccatcgcttgtcttcttgtcctatcctgttgttgccattcaaatgatcttctataaggcctatctgtgggggatgcatctatttgtaaggattcacctccaggcaaattaagtgtcactctaggggcagttgtcctctcttgtactatcaccaacccatcatcatcagaattctcattattatttctattattgtcattaacttcaatcacctgtggcccattatctgcatctaaatcaacatattctgcatccgatccaataggaccttcttcattacctcgtgtattattaatttctccaacgatggctacttcgtcatctgaaccgccattgtcctgtgaccttgtcgttgctacatttgtgccttcagaattaacaaatctgttcagcccatctctaggcctgtgaatacgtccatcaggatgtaatctaataggtctagcatcgtctctaatcctctggtcctcctcttgatcactttcgatgataatggggtcctcatctctaccgttgatgtggacctcttgtgaagcctccggactctctcgacccctcaaatccatcctctgtaatttcaaactagttttcaaaaaccctacggtcttccaaggacaatattcgctgctaataacccttgaccggcccttttagcagcagcacagtggtttgttatatcctatagttcataccttgcttataattctcaatgttattatatcatcacttcgtacccagtgacaaatatacagatggacctcttcaatagtaagtattataattacaattataatatatttaaagtaatacaggtgaatcaatccacctgctgctccccagatacagcttctgatagtattatagaaaaagacaaaataaaaaaataaaaaataaaattgttaaagttaatttaattcaaactctgcagtaagtagctgtgtatctattttacaagtttggcgatccaatctttttagttctattgtataataaatcttgtatccgatctttcttttattctcccatctatttctttagtccacttctcatgtatctaccaataacgacacagtgatctctttcatatggttctaaagtcaattgttccaatggtttgattctctcttcacgcaatttttgcacttcacgagcaaacacagtttctgcatccactgttgagtcgatacagtttgccttgatagagatgaccacaccaccttgatccttcaaaaacatgtgagaatttagagcaatgatacgggcttgatcaggttgtgcaacatctgcaaagacacagtccaccatacccaacaacattctgtatttttgtggatgtctagcatcttcaatgattggaaccacatttggtctcttctttgccattgcaatcaattctctacctggtctgtgagaaaattcaacggcatacacaacaccttcaggccccacaacatcagaaacgtgagaaacagatgtaccagaagcagcacctagatataaaaccttcttaccaggtgcaataaacaattcgtctaaaccacccataatacctgcagccaactttgatctaaatggattccacacacggtattcaaccttggttggtggcacaccatcttccttagaaggttcttcaacagaaactctcttttcaccgtaaacagattcacctggtgcaacgttcttggtgacaagcaaatcttctttacctctagcaatgtagataccatcgtgcttgtgaggttcgataacaaccttagctccacctcttgggccaccttggccaccacctcttgggccaccacggccacctcttgggccaccacggccacctcttggagcaccacggccaccacctcttgggccaccacggccaccacctcttggagcaccacggccaccacggccaccacctctagggccaccacggccaccacctcttgggccaccacgggatccacctctgcttcctggtctaaatgacattgtatttaatgagttcaacggtgttaaaacgttttccttgaagaataaggacaggacaagattctagccttaattgtactcgaacttagtctctagaaatcagttatatctaactaattagtgatgagatgagatgagatgagcatgaagttgaaatttttcaatttttttaaaaattttttcagtcacttgcaacgagaaacatttcttgtttttcttagggacggttcaacctgaaaatcattaaaccatgaacagggacaatcacaataataagggctaaccggttacgtcaagaaaaccagattgatcaccaatggtcttagttaagagtcgttccaaaagcttacgtgacacccaggtggatgtttcccctggttcgaaatttgatgatgttttgaccgcgatttccaagaataacaaggatacaagtatctacaggttaagattaacctatttgaaagagaacaagcagataccagttgtttcagatgagttcttcgctgcatctgatgtggaaacgctatatgttaaggatctaggtcctcaaatatcttggagaatggtcttcatttgtgaatatctagggcccattataatccattcattgttttactacttatcgcaaaaaccagaattgcgtagtagtggatcgaggtataacccatatatgaatcgtttagcatatttgttgatattagcccactacttgaaaagagaagtggaaaccatttttgttcatcagttttcacaggctacaatgccattcttcaaccttttcaaaaattgtttccactactgggtgctcaacggattaattgcattagggtatttcggtaaggggtttttctttaacgattccgatctgttcagagcttacagctttctaaagatcaataatttgagtgcgttagttgcatttttcaccatttttgaattatggaacttttatgcacacattaaattacgtatttggggagattatcaaaagagtctaggcaatactaaggttcgtgtgccgctagatgaaggtatcttcaaaatatttgtctcaccaaattatactttggagctattatcgtggattactttcacactaattttcaaattaaacttctttgcacttgcctttacaattgtttctggtactcaaatgtatctatgggcccaaaagaagaataaaaaatacggtactcgtagagcatttttaattccatatttgttttagatgaatatatatatgtatatatatatatatgctatccaggtattaacaacaaatcatcgtcaactgcttgatcttcttctgacatttggtcttcatctgtggtttccacatcagtataaatatcagcttcatttaattcgttgaaaaatgcactttgtaatagttcagacgctgaacttcgcttttgaggatcgaactctaaacattgctcaagaacttgaaaacaccaataatgatctgaccaaatttcttcttgatattttttaagttcataggcttgtggaccttcagtcgttatggtagtttccgcattagaggaaccaggtaatttgggctcgattgatcttctatcgtacaattcctgtgataaatattcatacgtttcaaacgctacgctgtagtctggaaatgtacccactgtacattctttgtctaacaatttgtaaataaattctttaagagcattaggaaatccgttctcagtaatatgtcttaatccactaacttcaaatcctaatccatgcagggcggcacatttgcggatcttcttccaaccgaaaattgtacataattccaaaagtgaatcagtatcatccatactttggaacagtgggaaccttcttgataaaagacttagcaatatgacaccaaccgaccaaatatcaattttagtagtttgagatccacatttcatcagaacctcaggtgccctaaagccacgagttcccgctctattagctcttttaatcctacgagtttcgttctttggataacctttcgataggtccacaccattgacattgtttaaatgtacaacttttccattttgaatagtcaccatgggcgatgatgcattttgtttgttggtatctcgtacgatacaggggcaaaactgttcatgacttctccaatctctgatcgaagctaatgaatcctcttcgacctcattcctatcgtagtctggttgcatttctgccaatccgaaatctactaatacacctctaccgatctctggattataaagaaaatttgtaggtttaatatctctatgcataattcccttcgaatgtacaaaactaagtgcttgtaacatttcccacaaatacatcttaattcccttgataggcaaatccctgtagaaattacgaaattcttcatgtggatagtacggcagcactgctatgacttgatctcgtactctggtcgcatcacacaggggtgccactctggtgcagccggttagcatataaagcaaattaagctcgttgtaaattctttggggtgaagaagtaacatagatcttcttcaatgcaacgtatcgagagcctggagtccaaaaatgtgaactgtatctctggcaaacttttcccttgatatcttctgccttgtatacagaagagaaagtaccttccccgatcttatctagcaacacgtactcgtccctcaacccttcaacgtcttcatataactgttccatctcatccttgatctcgcgaggaacatcttcgtgactcatatttgtttgattaaaatggcttctgaatcgtcagaattcccaaccaccctatttaataccagcagattaagctgaggctattctcacaagcctaaaagtattcctttcacctgtagcttcaagcttttgatgtatgtttgtgttttatgttgaagatcgatccgccaaggttttgaaatccgagttcaaatctgtcaatgttaggcacggaaagagacaaactctcaagggtcaacaagcaaattcgtaaaaggcgtgtaaagggtatttgggacactgaacttggaagttctagtagtcttaacgaaacccaccggttcgcttttgggctgtattttatttctggcctacaatcgccatctgcgggaggagaaagtataaggtaggcggaaatccgtaagcaccggtattgaatcacaaatgcaacattatttgattttattaatattgcttggtattgggctgtgctctccggtaacatttgaattacccagaggtcaaacggaatgcttttacactttgacgccaaaagatcactgtacaattaattactactttgcagtgcaaggtggtcaatccaatgataatactgtcaactacaagatatatgatcctagcgataaggaatcaccaatgattgaaagatcaaatattcgtctaggtgaatggtcattcccaggagaattaagaggtgaatatgcattttgcttccaaggaggtaatgaacataataagattgtggatttagatattagacattcatgtaagaacgaagctgatatttggtccgaaagacgtaaagcaagaagagaagctagacatctaagagatttgcacaatgatccattacaaagttcagtggaaaattcagtagataagattgaagaacaattgtatcaattagaaatcaatctaatgtattataaggcgaggaataagagaaatcaccatacagttcgctcaacagatttccgtataatgctcttctctatttatggcatcctgctggttatcgggatgggattagtagagattataattttgaaatggtttttccgagaatcgagaaaatatgctatttaatgctagttttaattctattaatgaatttaatgatattcaatttttttttattatcgtaaaaccattatcaatgttctcttggctcaaggatcggcttacctaagggcgatttggatggaccgccatgggatacatcgaagatagttaatccacgtaatattgtcctttgtacaatcccaataagttcttgaccattgtaagcggttaatttgtttttgaaataaactgtgggattggttacccgttgcttggcattaggatcaaatataacaaagtcagcatcgtagccaattcttaaatgtcccttacgatgctgtaatccaacttgttccgcagtattttcacagcaccatttaacaatctccatcagactaacggaaggattcaaagtggaccccaccgtatgcaataagggcaatcccaaaccaacagacgatataccgccccaagcactcatgaagtcacccttttctaactgtttcaattctggtgtacatggagaatgatcactgactacagaagtaatggatccatcacgtaaaccttcccaaagggccaaacgatttttctcattacgaattggtggacaacacttgcaaaaagtagcacctttacctattttttctgcagccaaactcaaataatggaagcaagtctctgctgtaatgggtaggccatccttgtgagcttgacgcattagtggtattgcctccatagatgctaaatgaacgatatgcaccgaaggtcctttcccagaatttgccgccatactttttttcaaacaatcaatgattaaagaaattgcatcaaattcgaatctatcaggtcttgaagccaaaaatgaatcgtattgacaagaatccgtctcttgatggtggttatcatgggaagtctcttgtgagcctgtatcaagctcagcatggaacataaccatcgctttactattagaaagttcactcatagcattttcaatatagcatttatcaattggtgggaattctggcactccagagtccattaagaaccctttaaatccacgtacaccagcctttactaatggtatcaaatctttcaaattacctgggaccaaccctccccaaaatccgacatcacaccataattgaccttctgccgccttcaatttggtgttgaaattggctacgttaatagttggaggaattgcattcaatggcatatccactacggtagtaacaccaccactggaggctgctcttgtaccagtagcgaaaccctcccaatcagttctaccgggttcatttaaatggacatgagaatccactaagcctggtaaaataactttgggagtaacatcttcaaaatcttcaacatcaaataatttcaaccttggatcgtcgaccgatggtaccaattcattatatatttcaatgatcttacccgagtcagtggagtacaataatgtagcagctgtttctctgctgtcaatgatacacctttgagagccaatagcttttataggcattttacgctgtggcacgattatcaaactgtaagaccactgattttgaatccatcttaccttttatatgattcccagggactcaattccattaatgctaattcggttattgccgaatacgagtcgctgttgataatgtggcctcgataacaaaaagtacatacggaacactcagatattcagataaatactttgataaatacttacataaacactatataaaatattattatatacatagagcatttcatattatatgtattatactatgtcatattatattacaactgaaacctttggtggaaagtgtaaattaagaaaatgcatgttcaattgccgttgaactgttgaaggaatgtaacctcttcctgtgaaagcttcaaaccttgtatcctctcagcatgcttcatcaaaaatgtgtagatactctgtgcaaaaggtgtcggatcgacgttgatcgatagacccttgataatgttcttgagagtttcgttggaaatggctacatggtcccccacgagattcacgatattcatgaatcccatgtatgcagaacttttctcttctagagaatccaagtcctgtagagcattgcaccatctattccacatagcatctgatgcaaagagtccattggagaaaacttctggcaaagtaatagagattctacccattgtaattgctaggttttccaagacagcggcatctaatatctggccctgagttgtgaacagatctagcagtaccctagagagatctatgatgtactcacccaaattgattctttcactgatgagaccaaggcaccagatggcattaatcaacgctggtataccgtcagggtcgtcattatgcataatttcagtgccaataaattttaagaactgggacaaagttgctgctaaaagttgcggatcgaagaaatagacaatatcacccaatagagcaaaagtggattgtcttacttcatgaaatggatcttgaaggcattgcaacattatttgtaacaaagtgttgtcactaccaggtgggaagagaagtggttggcattgggaacctaaaccttgtactaacccatcgatcatatcaatggaagttatgataaaatccttctcaggagcaacaattgccggattttgttgagaagtagcttccaattccacacagttgcacaatattctgaaggccctcgcatacacatctggagccataggcatgaacttttcacccagcgaggtggccacatatgaaagacattctaatagcggccacaattccttatcgttgtctggtagtaatgaccacttattcaccagatgcggcaataaaaccttcatagctctttcatctagctccactttctctgcgaatcgacttacagcatcatatagaataatcaaatttttcttcttgtaaaattcgaagcatctgttaaaactgttgagcaattcatcgtaaagaaccgtttccaccaattctgcatcacaactttcaatgaatacagctacactactgatggctgcttcttgtacgtccttcttcctatccattaatctaccaatcaccggttccaaaacggggatcaaaaattctgtatggtctttaaggatccatggcgcaaatctactcaaggaccaacatgtaattttccgcacaggagcccacacatctttcaactgatccaccaaaaatgggattaattgtggtagttgatcatcaaaatatttcataccaccttcagccatagcacctaacgccaaaacggtagcctctctaatgaaccatctgtcagaatccaaatgttcttttaaaaaggggaaagccacgtacatgacatcccttggtaaaatgttggtcatgacatctaaagtagaagctgcacattttctcaaattccactgagtatctacatctgattcatcaaccccactgtcatcatcatcatcgtcatcatcactatcttcaccatcgcctctttgtttcttaacgatacgaggagccgcaggtttgatgtcttcatctttgtcttcctccgatgcatcatcatcgttcgaggattccaaaaccattatagactcctcgttgtaaaccattttagtcaacaagaccggtactatatcagtgacaaaaggttgtatgatatgttcgggaatattgggatctgtacagaatgaatggataaactcacatgcctcaatggaaaccttttcctccttgacggtactaattagatgtaacatgaaatgaatcaacccagccaaattatccacaagtttgtcaggtctaaattttaataagctggaaaatgcaatacaaacctgtactcttacatcatcattttcatcagtttgtgccaattggaaaatgctgtttaaaaattcatcaatcctcaaactaaaactttgaggctgtaatggaatcacagtgtttaaacatttaatagcttcagctctattagtagctgttgtagaaccatttgccgtaatatctagaaagcaagctattaaattatcaattggcttaatatgaccactccactccagttggaaaaattgagcactatcttccataattttggacaatgtcttcatacttgcttcactaccattagaagccaattccactagattagaaatcatctgaacacccatcggatcatctctatgttgtctgtaatatgtggagaaaagagttgtgatgacaataccagtcacattggtaacaagagaattattcgaattgtacagtccatggataatatttgcctttacgtagccaatatcttgacttccctttgtcaaattatcaccatcgagcatggtatttttaagaagtaaacctgcagtagctctattattttgcaactcctgagctgaaaaatgcgataccaaggcttcactagactccccttcaatcaaaatgtaacaaagatagtttaaaaattctggttggatcttaaagctttccagtgcatccatggcccctctacgttcctcttggtgaggggccattgagctcctcaggagaaccgctaactgtaaaagcgattctaagttgggggcccacatggaaaatcaaactcttatattgttctcttatgcaaacgctttggcccaataaaaataatgagatactattatttccaagtttatgtatagaattatgtatctatgtgatgatagaccttctagtaactcgaagtttcggacctctgaacatttttcaccatatactcaaatacgaacatcgattatcaccactactatataacaatactacactataataccgtgctgtaatatctaactgttatatatacattcttaaattctaaacttcaactgatatgtaatgctcaagtaataatatgccgaaaaaaaaagtaatgcaaggtaagatgggctcgttcacttgctggcatcatcaatctgcttcaggagatcatccatcctgtggaaaataggatcatagagttgatcgatgatcggatggtgttttcctgtagttgtactgatgacacttgaagagtggaagagttgtctcgataccgaagacgcgctattaacacttgtagaagatcccgctctttctgcctccataaagatttcttccgatgaagaagaggaagaagctggggtttccttattgcgattttgctgctgacggcgattttgctgttgctgccttgggttttcttctatgctctttgtttttggatctgaatctccgtgtattgtcgtggaactatcatcttccgtatcgacaattctagtcaaatcttgtatagccctagatggtggtaaggtacgaggactatggtggtctgctagttgttggtgttgtggggaatcgttagtccattcggacgaagacggtgaaaattcaccgattgaaatagaatcagaattagaagtttctaaatgagagtttttacgtccaaatggcaatataggagcttcaaaaattttgtgtaaaccatcttgtgattcttcttggggttcatctcttgtaccttgggtctctatgaaagaatttctattttcattaatttccttagcaatatcttcatttgatcctgttttccccgtttgaacttcggtatgtcgtggcggcggtgttaatgctggttgtggcggtgaaggctgccgccttttttcaatgttcaatggaaccatagatgccgtgttaaaagacgcatcactattagcttcactcatgtcatcatcaagatcaacatttccatcattgtcttccccaattctacccatcctaagctttgattctgaaaattcatcgtactgtgtgggctcatcattctcgtaatcgctttcatcatctgaatcttggatatatcgatctgcataactgaccacatcattgaaactcactgatttattacttttaccgtatccctttagagctaaccttgggttgctgtcgccatcattatcatcatcggaaagcttgttgttttcatgtgcagtagtatcatcatcatcatcatcgtcgtctgttgaatgctcatcggttgtcgtatattgttcttgtgaagcctgttcctcagtatcactattcttcctcggcgacatattttcatttttccaacaatttaatctcgccaaacgttctggataagtttccaaaatttctgcaggtgcaaaaccaatcttgctatcagtgtatctccttacaagccaccaataagcatcttggtcgttaagcaacgtacaagcttcatcctgtttcaactgacaatgtgacggatcaggtccactgaaagcatacagtgcatacaatttatcaggatctaattcttgcggcggtggcaacggttgcaattcatcttcttcaaaaagttcatcctctaattccatattttcctcgtcttcttcatcatcttctaaatgtaaatcatcttcatcctccgacaatgccatcagcaatccatcgtacatcgatcccaagccaccagaactttcatttttagttgctcttctttctcctggtatttcagtttccatatcttgtagccttttctccaaattttcttcaaaatcagagtctgaataatcgtattcctgatccctattatttggatcttccgacccggcattactgttgttatcataattattactattactattactattactgttactgttattatcattactgttatcatcattagtattatggctgtactgattatttctatgactgtcattcattttcttagcgggcgatccaccagtgaccaccacactaccactattactttcatcctcaggttccattcgtctatgaggcttcaccttaagtaaatctgaataattttctgttaaatttggatcgttcaaaagatcagtatccggctcttctaaggaaagtttaccaccaaactctgctggcaacagcgatggagacactgatccctgaaacgcgtttactgagggaccttgattcatctacaattcgaattggctttaactgattgttgactgactgattaattgatagagtatagttgcttaaattagatcaaaacgcgttccttcaatcccttgttttaaagaaaaagatactagaaaatttttctcttctgttacaggacggtagtatctagggcttgaattaagtaaaacgcttcgcaggagccctatctctagatgagccgtgattgatatctcttaagttctcttttgtcttgttttctcagtagattaaaaataaccttgtttatatcagtagatcacaatggttcattattgaatcgaatcccactttttcgattttttcttcacttcgatatgttgagaaaatctgcaagaagcgaattgcacgtgatgagataagcttctgtgcgggtaagcaggagtgctctactctggagggtatcggagggtgaattagctcgaacaagtgcgatgaaatgcattttcgtggtatcctgtgagggcaactcttcctggttgttttggtttgttctgtgattgccgctgagcttttccatcacgagctatttaagcaaaaaaaaataaaccttttcccgtttgtgtatcatttgtttctcaattgcttccattttgaaagggaaaattcgtcttttttttccttaagcaagtattccgtttccgtacataacgtgccctaaccaagaaatgcgtaccctacattttgagccctaatatctcagtagggctttatcctagagaagtcagatgattcagattttcctcttgtttttccttccctgccacatttgactccgatcgagatgagatgagatgaaatttaacaggcattaaggttataataattatattacgccatgctgcaacgctcgccgagagtattagttattcggaatgatgtcctttataagtcgagcttcttttgagagacacctccgaatctccctatctaagcttagtctatcctaataaggaacctaataaggaactcaaggtttttgaagatggtagtcagcgtagccaaaactgaattggacggtattatcccactagttgctagaggtaaagtcagagatatctacgaagtagatcctgaaacaattttatttgtagcaactgatcgtatctctgcttacgatgtgattatggaaaacaccgttcctgacaagggagtactattaactaaattatcagaattttggttccagtacctttctaaggatgtccgcaaccatttagttccaattcctcagggtaaaactatttttgattttttaccatctgaactaagtcaagagaaatacaaatcacaattagaaggtcgttccttactagtgcacaagtttaaactaatccctctcgaggtcattgtacgtgggtacattactggatcagcatggaaggaatatacaaagacaggtacagttcattcgttacctcaacctcaagacctgcgagaatcacaagaatttcctcgccctatcttcactccttctaccaaggctgaacaaggtgaacatgatgaaaatatctctcctgaaaaagcagcggagttggtgggacaggatatcgctgatagagttgaaaaattggcggttacgctttatggcaaatgcaaagagtatgccaagacaaagggtattatcatcgcagacacaaaatttgaatttggtattgatgaaaagaccaatgaaattattttggttgatgaagtcttgactccagattcatctagattttggaatggtgctcattacactgtaggcgaaacacaggagtcctacgacaagcagtttttgaggaattggctcacctcgaacaaattaaacggtgtggaaggtgttaagatgcccgaagatattgtggaacaaaccagggctaaatatatcgaagcttacgaaactttgacaggaactaagtacaattaaagtaaattataaaaccgaagaattagaaaaacgaaaagaagaaaaaacaaacaacaacgtaaaaattaaatgaccaaaggatcagcggtatcttgtcctccagtggtaagcaggtttaggaactctcttgtcgtaatacccgtaaatggtatcaggaactttgccaatcttcttaccacttagtacttcacgagctctttcttcaacagcctgcacgaattgctcccttaaatgagcagtttcccgttcgtaatctgttgcttgcttctccaaaatcttctcaatgttggccaactccttttcgtaatctaagagatttctttcgaatctttctaactgtagggattttctggcggtccggatttgaatatcttgcaaaagttcaaatgtagacggacgtgtctttaaattggtatcgatcatagaatgaacaatggcatttaacccgtttgaataatattctggaattctatcgaatttacctgactttatcctattctgtaattccagataatttttagcttgaaatggtggatgtaatgaacacatttcaaagactacgcagccaagcgaccagatatcactgagaggtgaatatggctggtccattaaaacttctggggacatataataaggtgtccccacataagtcgttgcaaattggatgctattaccaagtgacttagctaaaccaaaatcccccaatttgactacgacttgactgtaatccacattgtgtatttcatccgctgaagtgccactatcgtcagcacttagaaagatgtttcccggtttcaaatctctatggatgacaatattctttctctttacaggaggtttcattctgtcgtagatggtggtcaatggagagagctcatcaccgtaatgacatttatacagtgcggataagatttgcgctaatatcccccatattatcttctctgggatatattttttttcctgcttgtaatgcttaatcatatggctcaagtcaccactagaacaaaattccatataaagataaagtatttcatgctgttcctcaaaatcccaattacaaaattcgactatattttcatgcttcaaatgtgataaaatcgtacactctgaaataagttgctgcctttccttactgctcatatgtccatacttaatttcttttctaaccatgagttttttggtcggtacatgcaggactttgcgtacagctccaaaagatcccctacctatttcttctaaaacctgatactgtgatgatgacggtggtgagggcgtcctcatctgcttaggagacacgaagtcacctaatagatcgcgcctgttatacatctcaaactctgttcgatctgttcttctgtgattctcgagaataacttgagagaggaagataaacggggagatggagcaaatgatgtgcaattgaacagactctattgtgcatatttcattttttcgctctttcgaagttatatttacctgttaccgaaacgggttatatgtggaatcatatgccccatactttaatcacattaccttttcgagtgatataaaaataaatgatagcggttcagtgttaagttctgtctggaatgtcgaatgcatcattctgcaaacttaagttaaaacgactcttgctttgttgtctgcgtaccgatggaattgcgaaactagatggcgaggctgtggcaaatgacttaatgtcattacacaactgatgaattaaaatggaatcacaaccgacttgaccttctatctgatggttccagtttctatctaggaagtccatcatcacttctaatcttttcttaataacaacctctgcacttaaatctctttcttttaaggtgctcagatactctagagatcttgcgattatcaatttgacgaacttcaacaaatcgatttgaatcagtaaactatttcgataaagcataaagaaagccgttaatctctcattgaaactcgaatgagaaaaaatcttgaacgaaataaatgctaatggtgtcagcaagcagattttcataaacttcgtgataaaattcccaaattcgagattattttctttgatgcggaaaaatggttcgaccaaatctcgataagttaataaaaccgatggctttcccgaagaacctgaaggaaactcaattgccaaactatccggatggctgataaattttgttgtatcatgcaatgcaaactgtaaagagtttaatagaatttctaaacctcccacaataaattcctcatgggatcgtaaaaagtgcagggaaagttccactaaaactggatgaaattctgtcaactctgtagatatttccatgacaattgacaagggtacatgcaacagttgaagagactttgcacgggtggtcaaaagtcggaggatcaaatttatgaagttagtattattcaaaagttggtttaagagcaatctgttcaaatgtgtagcatggtaaataacactcatgtaatatttccacacgtaactgttttcttcatcacaaaatttggaatcttcaaaaaagcctagtatccaaggaaggaaagcctcaggcagctccatggagggtgcagtggtggttggtactttggaaggggttgctgctacaatttccgcggctgtactattatgcaattgaattagaatcgaggttaatgctttgaaaattgtatacattggttgctctgttgttggtggtaattttaaaatgttttcaatgaattgtttgggaaaccatgaggaagcctcggggaaagacgatagtttcaatactatcgactgggtggatttgttggtaagattagctatcaaattgggtaccttgacatgcttggaacaccactgacaccagaattgtggagaatcgacgatatccaaaaacttataggctaattccaatgttatagaatccttgaggatgtgggttctgtaaagaataccgcattgaatcaacactttgtagttatccttgaggaaaaactgctcgataatattattatattcgagaacggagggcacaccacccattgatatgaattttttctttagattaccaaaattaaatttcttatcatattcaaatagagatatgatcatgttttcatttgaactatcacggagcaagtggattatcgattgcgagatatcttcaccatccaaattctcgaaaagtatgctcaaaacatcagaagttaatcgtactgtccctttacccaaattatccaatattcctttagcccattcgacatttgcagcagtcctatgcatagatctatggggcgtactaggatctccatgagttttagattcactgctgccagtaacagtagttaccagggacgaagatgatacagaggacgcagaactatagttgacccttgtcttagctaatgatggaagatatgaagttgggacagaggtgtgttgcgaagaagggtttgctagactaggatcatgaagaggttccttaaagtcatgatcccattgaaaatccatttcattattactctccttaaacaattccagcttgttagcaggagattcgcctgcaacccatttatgtctcaaaagctgtgccgcggttggtctttgatacatattcttttgaaaacatgtggatagaaaatcctgtgcttccttggatatgaaactaggtggaataaacgcatcattttcaatcgcatagtagatgttaatatcaactaaattatagaatggtggatttcctgttaatacttccagaacagtagcccccaaagaccaaatatcacttaaggtagacgcacccctattaccaataatttctggggccatccagttcaaagaacccgccaaagtcattgccatagtcatggtattaacttttgtagaaacgccaaaatctgctaatttgaccacattattagaatccaaaagtagattagcggccttaatatctcgatgtatcacaccttgttcgtgcaagtaattgagcccattcaaagtctgcttcacgtatacttttgctttggattctggaagaccattgccccttgatatgtaatttttcaatgaaccatgagaacagtattccaatattatgtagagattatgcgacttttgaatgaaaccatgatacttaacgatattaatgtgatttaaatttttcaaaagatctatctcagacatgatatctgtcagttcatcatcattttcataatggacctccttaatcgcgaccaacttctgtgtctttcgattaattgctttgtaaacaacaccatatgatcctttaccaataacttgctttaactggtactgtatttgatttctcttctgtggttcctgtttcactgattgttcacttcgattcaacgcctgctgctgttgagcaggtgtgagattgattctttcagtcatcaacttctacacttaacagatcaaataatgcacacaatcagccgagaaaggtactattattgggagtacttgtcacaaaattactctctttctgggaagaaacgaaaaattgtagaaaattatgatacactgttgatgtatatccgtttattccttcgagaaataaaagacagaagtgcactcaaaaggttcgaatactaaactttcagttttagccgccgacctattcaagaaaattataaaagaagagtaattcaatactttatttgattttctcaattcctctccagttgaaccacaagcgagctgatctccttccctaattgtttaccgcttccacttcgggtaatgtagttaccatcatttaattatggccgtctagaatgagatgcacagcagtcacaatgatcgaacaaaagaatttttttttcccaaggggcttcctgcgaaaccccgtgatagcctgtggagatgcatagaatgttcaaaaaaggcttctagaaaagtgtcatatgcagagaacagcgatgccccgcattcaattttaggttagcttctcacatgaccatctgggaatgtcaaaatagggtagcgatttgtccgaatggagtcaattgataaagggtagaaaccatttggatgatatttttcaattagtgcggcgttacattgctgcgaataaccaccgagtttggggagttgacggagttactgagcactagaatttatcattgatgatctagtgtcatgcaccctggacagatggataatttcgttttaaaggtcttctttagcagatgatcgctcagaaataagaagtttaattgaataaaaggtacttttacaaggaaagaatacagttgaagagagaacaccatcaagtatgcctgatctaccacgcttacctattccgccattaagggaaactttgaatcgataccttgcccgtgtcgaacctcttcaagaggaccgacaaaataataagacaagggaatgtgttttatctgatgataatttaaaaatgatgcagaaattgcatgaacatttacttgagtatgacaagcaactcgctagggaaaagcctcaatcttcctacattgaggatttttggtacgatgcctatttgatgtacgaagcatcggtagtcctaaacgttaacccgtattttcttttagaagatgatcgaaccatcaaaaacgttatgggatgctacggcgagtatacttgccaggtaaaaagagccgctaaactcattttttcaattttaaaattcatcaaggaaatccgccatgaaaatctgagaccagatgttgtccgcggtaaaactccactatcaatggatcagtacgccaaattatttggttgtagcagaattccagctggaccaggagaaaagtcctgtcatttacaagttgatccaacgtctcatcacgtgatggttacatacaaatcacaattctattggttcgacgtattggatgtgaacaatatccccattttctcaacaccagaacctatcgaatggaatctttattcaataattatggatagtgaacagagtgaagcttcaagaccaccctttggtgttttcatcacagaaaatcgtagagtctggtccaatgtaagggattatatcttccatgactctgatcctacaaattggaaaaacctcaaaataatcgatagcgcactgtttgtaatttgcctcgatgatgcctcatttacagaagataatgagctcatcaaatccatgttatgtggtacttctcaaatcaggttaggtcctaacgatttggcaaaacctttggatgctcaacatggtacctgtcttaaccgctggtatgacaagcttcaattgattgtcacgcagaatggtaaagctggaataaattttgaacacaccgcagtagatggccatacagtgttgcgtcttgccgctgacatttataccgattcaatcttggggtttgctagaggtgtcaccaagaatgtacccgatgtttttactgagacatcagaatcagattctgaaaatgtcaacttgaatctaattaccatcccacggaaactcgaatggaaagtagatccattcattttatcatcattgcattttgctgaaactagaatttcagatagtgtatcacaacatgagtttgctgcactcgatttcaccaagtatggaagcaatcacattaaggctagtttccaatgttcaccagatgcactggtacaacaggttttccaagtagcatattacgccctttacggtaaattcgaaacgacctatgaacctgccatgactaaacaattcactaatggacgtactgaagcgattagaagtgtcacttctgaatcaaagaaatttgttaaatcaatgtttgatcgatatgccattgatgaacatcgcattcgatttttgagaagagcatgcaacaaacattctcagatcattaaagaatgttcagagggtttaggtcaagatcgccacctgtatgccctgtactgtatatggaatgaatattacaaagacaccatgcccttacccccaattttcagcgataaatcttggtcaatacacaatagcacagtgataagcacatcaaactgtggtaatccatgcctgaaaagttttggatttggtcccgtaacccctaatggatttgggattggttacataatcagagacaattcaatctcactggtggtatcgtcgagacaccgtcaaacgaatagatttgcatcattgattgaacattctttgttagaaatcgatcatgttttccaaagaagatctgctgcggattcggaaattagcgctgttacaccatctactaggcatggttttgggagactggaacaacaacgtagcgacagtttagtccatctgctgtccggttacaactatttcgacgttaatgtatcaggataaaagaaatcggcacaagggtcttataagcacccaaaattggaattgttagcattcgaagctttcgaatcttctgaagcctttaacgcataaaatgggggggggggggcacattgaacctacagatgctatttaacaactttgaaaccaaggatggcgagcagtatttcggagttatgccggtatgcataatcatcgtaaatcaatgttgtaaacttctgtatcagaaatatgtaaatacaggtgtttactacatacacacattaaaatggtaagagtcactcctacgttattcatagtgttttgattcccacggcctactattggctaccgcgttacctagtaattaaaatatttattgtttcttggcgcagaagattcttggcacattacccgccttttgacgccagcaaaaaaggtgaagttctcttcaggggagatgaaaaaccatataattggagcgagaaagagcagtgatcacctattaagtgagatatactaacttggtctcaggaacaaagtaagattgatactaacgaacattgtcgttgactagactgcagaaattccgattcaagtataataccaagagattgagcgggatttcgatcgaggaactgctataagaaggaatcgatcagagagaaaaaaagcaaagaacttgaaaatagatcttacaatagaaaactattaaccatttcgaattgaattcagtatatttaacaacttttatcttctatttgttcatttaagcatttggcacttaactttccatggatagagacagcgtggctataatatctcctggcggccaaagttattcgagtagtagtaatttggatcctcagttggataggacgaggtcccaaagtactgggaatgagagtggtgaacacgatgtagctttggctagtaaaccacttttaaagctgaagctcttggattctctacgtcaaggaaatttcaagcagttggaggctttgattaaaaacgaattccagccggtgggggatccgaatgtggaagaagtgaggaatttagttttgcactacgctgttcaagttgctcctgctgctttaatcaaagatattgtccgtgaatgggccaataataccagaggcggaattaccatcgatattaactacagggatgagaatggtgatactccattgcatttaagtgcattccagtcacgcggagacgtgatagagtttctgatggatcaaccacacgttaacgactgtatactgaacaactcacatctgcagccggtagagatgtgcaggaatttgagcattgctcacatgatgcaggccaaaagggctacttatgttgcagaaattgctcaagaatttagaactgctttcaataacagagattttggtcacttagactcaattctagttaatccaagaaatgcagaactgttggacattaatggtatggatccagaaaccggagatactgttctacatgagtttgttaaaaaaagagatgttatcatgtgtcggtggttactagaacacggtgccgacccttttaacagagatcgtcaaggtaggttacctgtggatcttgtcggtaaggtaaatgagaatgacagcgcaacgaatactaaagtggcgatcgatatcgagttgaaaaagcttttgggcaaagcagccaaggaacagagtgtaatcgacgttaccaataatttgcatgaacccccaacacataaaggatacttaagaaaatggacaaattttgcacaaggttataagctgcgttggttcatcctaagtggagatggtaagctttcctactataaagatcaagccgatacaagaaatgcttgtaggggttctttaaacatgtcaacatgttacctccatttggattcttcggaaaaattgaagtttgaaattattggtggtagtaacggtgcaattagatggcatttaaaggcaaaccatcccattgaaactaatagatgggtttgggctattcaaggtgccattagatttgccaaggacagggagttgttgatgaaatcaggaacggtaccaccatccttagcaatgagtagaggtttgaatgctggcggtagatacgattctccattgtattcttcacaactacaatacaatcaaggtggtggtaagaatagccaactgttagatgaggagctgggtgtgtctgatgggtcggctcagcaaggtagaatgccctcctcttcagatcaccgtaacaaaagagtaagtacggcgtcaattacttctaatgacttaaggttgaataataatttgactgaatcaggtaaggaatacgttaacagaatggtgggtaacaggcttgattccagctctcgcgaaggccgctcccgtaccaactctaacctgtcccataatcatgcaaacgaaagatctggtcataacagtctagtaggaggggttgctggccacccaggcaatagtcaaattaacaaccagaaacgtcaagtgaatgaaactcaaggtgaagatagattaccacagcaacaatcccaacaagaagagcaacaatactatggtcatcatcaaacgaacgcaaacgtccaacctaagaagtcaacgcctttggaagcttcctctactcaactgacttcaacagcaagaacacctgaacatgcaggtggtgcatttgaacctgcacccactgattcaattgacagccacgtaccctcgaacgaagatgaattagacaatttctctgacgaagaggaggataaccaggatcgtaactctaatttcgatgtagatgatgaagacgtcaaaactcaatatggcccttattctcaaagattatcaatgctccaaagatcactgtcaatggaattgagttcattaaaagaattattagacacaggtcacccaagcgaggaagcttggggcatgttaaggaaatctttgggttctatctccaacacctttgaaaaattgtacttcttgacttcctctagggataagaaattgggatctttgttggcaaaacaacgtgaagtgaacaatgtgtggattcaatcagttaaggatctagagttggaattgattgaaaagagcaaccgtttggcctccctagataaagaaagaagagggctgaaaaagttgttacacaagaaattatctgaggctggtgcttccactgatggttctcaattcgattccaccacatctcgtcaagtagacgattccaatgctactctagaaggcattgccaaatttattgaagctacaagggaagaagatgaagaatcggatgccgaggtcttctttgacgctgaagatttggtagacgcttctgacgaggatgaagaaagatatccttctgaatcgacgaaccaaacaaaacctgattcatcagaaggttctattccacagcatggagaccgttcatatggaaacaaaaaggaggaagaaggcaagtctcaaaacagggatacagattataatggtaaggatgcagagcaaaagttctccatcaatgaaccaccatctactgcacctcctccagtaccaagcactcatgaagatactacctcacagaaggtaccggaagaagtgagaccagaaagtcaatattcctcttctgaccagacccgcatttcctctgcaagccataatcgtaatcctttcagagaaacggaaggtcaatacgccgcagagggcgcttctaaaaacaatgaagacattggcaaggagactgaaaattttgaaaggaacgaaggccaagctggcggtgctccatcctcaaatgaattaaaacaattgaacaccaaggtaccagacgaaagatcaaggaaggaaccatcttccactggctcaccagtggaaatggccagagacaaagttggaacacctcaagaaccacaagttctacgtcctcagggtaaacgtcctcctaaagatgttggttccggtgccgctgtggctggtggtgtcgctgctggcgctggtggtgctgctggcgtctcgaaatctgattctactaagaatcaaaaggaagatttcggtcccagacatgattctaatcaaagctcgatgaaaaagcctagcgctaacaaacctgagcagcaggatggtactgctcaagataatgaactaatgaatcttccaatggtcggtgagacggaaaaacaaaagcaaaaatattctgttattttgaaagaaggttccttcaagggttatgaagacggagtaagaaagagattgagaattgatgacgatgaccgtccagcaatcagtctatggtccgtactaaagtctatggtcggtaaggatatgactagaatgagtttaccagtcactttcaatgaaccaacctcattgttacaaagggttgctgaagatttagagtattccgaccttctggatactgcttcgacttttgaagattcctctttaagaatgttatacgttgctgtgttcactgcgtcttcgtatgcatctaccgttaagagggttgccaaacctttcaacccattattgggggaaacttatgagtattgtagacctgataagggatacagattcttcacagaacaggtgtgtcaccaccctgttgtttctgctacttggaccgaatctgctaaatgggacttctggggtgaatccaacgtggacacaggattcaatggtagatcattcaacattaaacatttgggtttatggtacatcaagatgcgtcctgatagcagtgagggtgaggaattgtacacttggaaaaagccaaacaacacggttattggtatcttagttggtaaccctcaagtggataacaacggtgaagtcgaagttgttaatcatacgactggtgatcgttgcttaatcaacttcagagcccgtggttggagatctcaaggtgcatacgaagttactggtgaagtttttgacaagaacaataacaaaaaatggattctcggtggtcattggaatgatgctatctatgcaaagatggccactcctaagaacgacagcgatattatgaagaccaaggacacctcttctactggtcctaaattcgatggttctaaattcttagtttggaaggcatctccaagaccagaagcacctttcaatttgacgccatttgctataactcttaatgctcctcaaccaagtctcgtaccgtgggtagctcctactgatactagattgaggccggatcaaagagagatggaggatggtgtttacgacaaagctggtgatgagaaacatagattggagcaaaagcaaagaatggtgcgtagaaagagagctgaaactggtgaggtccacaaacctgtttggttccacaaggaagttcatccagttactaagtccgagtactggcaattcaacggtgattattggaaattaagaaaagatcacaagctaaaggaagtttgcccagatattttttaatctgatcgagtatgctgtttttaccgctacgaacattttatgtcaattgtttctgattcgtttcgattcatctctattttatacttcacgtattgtatcaggcatatttttttaatgaacttttagcctcaatcaattcttcaaggctaatcagacaaactatcgttagtctaatttagttatcatggatgtaagtaaaattacctttttagtatttatttaacgtaatttaattgttctacaggatcggtttatcactatttagtagctatacatacatacacaaggcatcatcgcgttaaaagtaatacaagagagtggctaattaaaacatactttaaccattggcatgcatcactctacattgcaacttgtttataacaagttgcatgatgtgcttttcagagctattctggctgcttaaacgaccttaaagtctaattttcattaagattgttcagctgtgggtactgaaggaaactcttagagatatggcaccactttgatacaaagtagtatataagaggcataggatcattcaactgacatacaattgctgttaacattaagaatggatatacagcaactcaaagtgaaaggacaatgactttgagtattagtatcaatacaccacccccctacctggttcttaacaagaatgaacaattgcctgtggtaatgacagtagcaggctctgattcgagcggtggtgctggtattgaagcagatattaagactataacggcacatagatgttatgcaatgacatgtatggcggccttaaccgcacaaacaccagctaaagtgtattctatccatcctctccccaaagaattcatctctcaggtattggatgcaaatctcaaggacatgaactgtgatgtgataaagacaggtatgcttactgcaaatgctgtcgaagccctagctgccaaactagacagtatgggatctaaaaggcccaaattggtgatagatccagttttggttgctacatcaggttcagcactaagcagtgaggagttgattgaattagtcaaagaaaagattacaccattagctgatcttttaacgccaaatatctacgaatgcttcaaattaattggatcggaattcgaacttcaaaacgtatcagatctttacgagttggctcgtagagtgtcagtggctactaaaagcagaaacattttagtcaaaggtggtcatatcccttggggtcaagacggtaagaattttgttacagatgttctttatttgagccaagaggataaatttgtcgtttacaatggacctcgtattctaacaacggctacccacggtactggatgtacactagcatctgccattgcatcaaatttggctcgtggttatccaatagctcaggctgtttatggtggaattgaatacgtgcagagtggtgttagcattagttgtcaagtggcaagttcacatatcaaggacaatggtcctataaatcacgtctatgccgtggaagttccgttagaaggaatggttcaagacgagtgctttaccgcacgagatgtaatcccaagtaccgttaaccagacggtttccgatataatcaagggagatttttttgaatatttgatttcccaccccaaggtcaagcctcattgggaaagctatatacatcacgatttcgtgagacaagtcgctcaaggtacattacccatccataaatttcaatttttcatcgagcaagattatgcatacctgttagactatgctagagtccactgtatcgcgggaagcaaagcaccttctctagacgatgtggagaaggaactggtcatagttggcggtgtaaagaatgaaatgtcacagcacgagaagaggttgaagcaagagtttggcgttagcgataacagttatttcgatcgcattgaaagaagtcaagccctaaaagcttactctagatactttaacgatgtcgccaagagaggtaactggcaagaactagtggcctcgctgtcaccatgtctgatggggtacggtgaagcacttttacatttccgcagcgatattgtcgtcgaggaaggaaccgtctaccgtgaatggtgtgatacttacttatcgccttggtacgttgatggtatggaacagggtaaaagtctactgaatcaaattgctcggacttatccggccgatcagctagacaatctggtgtccatctacgccaatgtgtgtgaactagagaccaacttctggggttcagccctcgaacaccgtgtcgaatgaacgtcgattgaatcgctcgtatagaacattctacgtaaatcatctacatgtatagaataataaccgtttagccgccgaagtactaccacgtgatcccatatacacgtgcctcgctttctttttcgccctgattgctttttctagaaacttctatttttcaacacatcccatcaaggaaattgaatggaaaatgggaatgaaatacggagcatcaagaaagactattaggttttgcttacaacaaatgcaacgtttaaacgactgctattgcggattatagtcagttgtaaaagagcttctaagcgatctttatataactaatcgtcaccttaagttgaattcttctcttctagaggaggacctttaggatagttatcaattgctagttttatgttaactgttccagcataacttggaattgttttagatttaacgataagaactacgacaacgagagcgcatttcatcccctttgtagctcctcaaaacataccgttacaagagggagaacaatatcgtctgatctttacaaagaactgtaggcgtttcacatctaagaggccattactaatttaaaaagataacactctcaaaaaatcagtgccagggaatacaataaaaacaactctcaacaacatacagataaactacaagtacgatacaacaacgatacaatgacatccactgaattagatttaaaaagaaccttgacagacgtcctggaagacgaactttacaatatcaactaccatggtcaaaattcaaggagaaacgttttaggactatcattaccagcagaatttgatgaaactatgcttaatggggaattttggaatcaacagcaacaaccacaacaacaaccacaacaggatcagcagatagaatggaaccaatcccaagacgaaaataatatctttaacaagtatgctgatccttcattgactacaacttcatcacatcttaagaatgacaataacaatgtggctacgactcccgttcaaggcactgtcaatctaaacagtgttatgaaggtgaataatccgttccttaacatgagataccaattaccttacgacgttaagattactaatgattatcacgatgaggctgatagtatctatagtccacaagctgatgaagatcccatcgggtttgatggctctaacaatcctaagatgcaatggccattgcaagataacaacatggcattaagtaatgaagatgctagaatgatttttgatcatgaatttgcagccgatgatgacgacctaagtgatgaagatgacgacgaagatggaaacgaagatgaaaatcaaaaagtgtttgatgcgtgcgattttgttgatggcacaaagggttttggtgcccaagatagttcggatcaagcaattatggatgatgaagacgatgatctgatagatgaagacgagttatacgaaccttctattagaaatggtaggaaagaaagtgttgtcaccacaccacaagctgcaattgtagaaccttcaccgccaataacaacatcgacgtcatcttctgcatttacgccctcggattctcgcagtagcaataacaatagtagatcgaggcgcaaattacctattactgatactaattccaacaataataacctgacttctacgggaagtcatcataatagcagtagtagtaataatggtgagatttacacatgcttaattcttaataatattaccagacaaccgtgttccgctcaattttccaggtcctacgatttgacaagacatcagaatacaattcatgcaaaaaagaaaacagtcttccgctgctcagaatgcataagaatgttgggacacgatggttatcaaaagactttttcaagattagacgctctcacgagacatataaagtccaaacatgagaatctttcattagaacagcgtcaagaggtaaccaaatatgcaaaggaaaatattggttacgttgtttgaatttaagtttcacacaatcgtcacaactgaacacttattagcattttacgaattagcatcacggaaaacagaccttcttacattataacgttgttttattatttggttcgctaatctccatcaattatttcatttttctttatagactacatatacataggttgtaatctgaaataataccacggcatttattaaattttttgtatatctatcattaacttactttaatctaatttacggattagattggaacccttctctacgtaccttttcagcatcaatctttgccttctcaggatccaggtagtatcttctcacaaatgtgaaattctgcttatccaattccacgaccaatggtgtcgcattggcaatgtctacactcttaatgtcttcgtcggagatcccctggaggatctttaaaatggacctcacagagctaccgtgtccaataattaaactggaatccaaattgttcttttgagatgtgggaatcacaacattacgtatgaatggctccaatctttgcaccacgtctttcagagattcacttgcaggtaattcttcaccaatctgttcttcaatgttgtactttaaatgtctatttggttccttgaaatcataaccagtcgaagatccctggtcattaacttcttgcaacatctcacgattaagatcaacatgtggtggtttaccttcataatctcttctgatgtacatgtattgatcttcaccgtattcttttaaaacgtcaggtttcctcttaccttgccaagaaccatagtgacgttcatttaacctccatgtctctagtacagatgtatatccctgttttaattgtcccttgggctcataattagatcctgaaactacttcataagagcccttcaaattcatttcagcaagaataacttccatggtttgtcttgtcctcaccaatcttgatatgtagccaacttgtggtaatggtatgctatgcgtttgacaataatctataatcaaattagctgcatttttggcctgatctttacccttctgtgtgagtccagcatctatccatccacagaagatattctcatggtttaattcactttgaccatgtcttaacaggatcaacttaaaagtattactttcaatagtcattgttcttaaatgcgatacgcaagggtatagaagtttctaacatatccgtatcaatcccttcaaatgttatattttccttaatcacatcgagccatcctttcttaccaaagtgccatctcatgatggacaccgtctgactcacatgactggaaggtgtaagttatatcatattaaattatatataaattagcgattagaagggtaagtggtaactcaagtctctctttctataaaagatttgattaatccaaatggcgtttcttcatattcttttaattcgacttcaccacttggcgtcaagatagtgttggcctggacgaattgttttctgggcaatctcttggagaccaccaggtctctcaatttggccagatctggcgtcacttgtgatctttcgttgtagtatttagaaccattttccacatccgcggtcgatttgtaaatgtgcaagtgttgtaaataatccttgacacattcgtgaccagcggtttcaatcaaggatttatccaatctgataacaaggtcttttccgtcatccaatggttcaatttggaggaacttggggtttggtgaatgctttaagaaggtcttcatgatagagaatcttgcttgcatgtgaggttggccccatttaccagactcagggtcccaatattcaagtgccaataacccagcacgagccatttgtaaataaccggcataaatgatgttatcttgatcttctttagttttgaatccaaagatttccaacaatttacggttagtgattaagtacatggcaatgacttcggcacgacattcttcaaatgatcctgcaacggaactgaattttgacccccaggtttcacccaatttgtagtaagtagttaccggtttaccatcgagacctaatggtggattctccttatcgaaattaaacccgtccttggtttcactcaacaatttaccagaaccatgtcctaacaattcatgaataccaacttggacttcgaatgagtctccttggcacttatcgtaaatggggcggtcttcaggtgcaatgaaacttggtgggtgagtagatgaacccttggcgcttgcactcaaaatgttacctagggaaacatttttgaacccaacgttaagtctcacatcgtcataattagggatgttaatacctgcaggaattcctgaacctgcaaaagtgagaacctctatagaagtgaaatctggtggatggaattcatttttctcaaatgctgaatcccatggcaacaaggtgataaaatcttgggcattggaaaccaaagtcgaaaacttcgcggttctttcttcattttgaatagccactagggattcaaattcaccaatgatacctgaaggttctctataagtttcaatgaaaccgatgttagtttcaatggcaggtgaaatgtctttaacccacaatttttgcgcttctttgtgggcatgggaagaaccagaagtaaaatgatcaatgtattgatcaagcatatggcgttgagtgtcattggcagcgtattctttagctttttgtaaataagaagctacgattcccaattctcttgagtgatcaccaaatttaaaacttacggtagagccattggatagagtgaaattggagtttggataagttggtgccaatgtattggttttattctcagatgcaacccaaatggcaaattccttctccttcaatttttcaatccttgtgttttcaggcaagatccccagtctaccaaagacttcttgcttcagcagagccatatcttcagcagaaactttaccaccaagataatatgaggacacaaacccctcggatggataacctaggaatgcaattttttcattaatgaagtagatgccctcatcgaccaattgtccaagagtgttgaaatctttggagccagatggaggtggattttccaattttaaagaagcacttttcaaaattttggtaaagaattcctttgagcatccaggaacaaatttagcatcaccaaacgatttgtagttccctaaatttgacaaaaattgagaaaagtagtctagatacaatttagtctcgggttcgtcaggataattaccatccaattgaagatgaacgtatagcaaagtatcgtaaatcgattcactctctttggaaacctgtcttagaacaattcttgttcccgcatgagatgcttttgacatataatgagcgtacagctgcttctgttttgacaattgagggaagtaatccctaactgatagcatagaaataggagcatcacgatcagcgactgaattgaccatttttcttcttcttttccagtttctttcttaccgctttctcccttaccctttacttggttgtgttaagaattcgatcaacctgtcaaaagcgttccttggttgcatatatatatatatatatatacataagcaacacataggtatattatattagtagtattaaaatggatttatataaaacagtacgtatttggaaaaggaaataataataattggttgtcgttaaatctacaaagtaaacttctggttcttgctcttcttagattcaccgtatttcttaattctaatagcttgaatgttaatgaaaccagatgtatcaattggagagaatcctgttagttcgtccatagatgattcagttggatcgtacaagttttcggtggaagaagatctacccaaaaccatggcgttacccttgtaaagtctcattctaacagtaccgttaacggtagtttgagatggcttaatcatagatctgacgtattcacattctggagtgaagtaggcaccgttgtaaagcaatttggagtaagttggagtaacgaattgatctctcaaatgacgaacttcacgatcaacggtcaaaccttccaaatcgacatgggcctttctcaagatggtcaatggggcttgttcgtaacaacctcttgatttcaagttgatgtaacggttttcgacaatatcgattctaccaacaccattggctcttcccaaatttgagacggttaggaagatgtcggatggagaagtaacggtgtgactcttaccttcgctgtcctggtaggtgaccttgactggaagaccctcttggaaatcaatagacaagtcttgcggtttgtttggagcgtcttcagggtcagtgatcaacttccacatatcctttggtggagtggtgtcaggttcttccaagataccagcttcataagagatgtgagcttggttttcatcagtagaccatggctttgacttagtttgagtcactgggatacccttagaggcagcgtattccaaaagatcctttctaccagcgaacctttcgaaaaattctggcaatctccatggagcaatgactttaacatcaggtttcaaagcgtagaaacccaattcgaatctgatttggtcattacccttaccggtacaaccgtgagagacggcaaaacaaccttcagcctcagcaacgtcaatttgagccttagcgataacaggtcttgccaaagaagtacctagtaggtaaacatcttcgtagacggcgttgacttgaacagcagggaatagaatatccttgacgaaatcttcacgacaatcgacacagacgaacttggaggcaccgatcttcaatgccttttctctagcagcgtcaaaatcttcttcttgaccaacgttggccaaaaaggcaacaacttcatagccttgttctagcaaccaagccaagataacagaggtgtctaaaccaccagaataagccaaacaaacctttccctttgacattgtttaaaatactaatttactttattcccttgtcaattgcagttggaatttgttattgtcgtttacatatcatcacatttcatatatatatatactttttttttcacttctttgttaaactgagtcacatcaccggaaggcaaaaaaaaaaaaaaaaaaaaaaataggaaaaatcaacgggatttctagaccgatattaaatgggtttaagctcaatcgtcattccatcttaatgccataagatatctggtaacaaaatccaagactctaatcttgttgtctttctaatacacttttcttaatttttttttttctatatgccaaaatttacactattgtacaacataaaaatccttcctaaacgaactttctaaactactcttgagaaataaattattctacgatatccaattcttcgatcatggatggcaactccttcatgggcacgttttcgtaagtgatttggtagacggcttcaaacaatgggtattcttcggtgtgaccgctggattccaaccattggtggacttccttagcagtaatcaaaccttgagcggattgaccgttcaagatgtccttttcgacttgttcaccgctcttaccagtcttggccatttcagtggcgacacgaacgtttctaccaccggaacaggtagtgatcaaatcagcaacacctgcagattcttggtagtaagtttccaccttggattctgggaagaacattctaccgaacttgatgatttcacccaaaccaacacgttggatggcggcggcagcgttgttaccccagcctagaccggtgacgaaaccgcaacccaaggcaaccacgttcttcaatgcacctgcgatagaaataccagcaacatcgtcgatcacattgacgtggaagtatggtctgtggaacaattgtttcaagacacggtggtcgatatctttaccttcacccttgaagtcatctgggacttggtaagcgacggtagtttcggaccagtgttccttggcgacttctggagccaagttagcaccagatagggcaccacattggatacctaattcttgagtgacgtagtcagaaagtagttggacaccctttggaccaacttcgaaaccctttagacaggagatggcacgagcatctggtttgatttgacccttcatttgagaaacgatacggcccaaaaattggtgaggaacgttgaaaacgatgacatcagcgtccttggtagtagagatcaaatctgggttagcgaccaaattctccggaagatcgatgtttggaaggtatttgacgttttggtgtttggtgttgatgatttgagtcaatggagtaccatcgatttgttcttcgaaaacccacatgtccacacgtccttggaacaactctggcttttctttggtgttttcggcaacaaccttagcgatagtggtaccccagttaccagaaccgacaacagcgaccttgtaaggattctcagcggtaacaattgacattgaggaatcagtcttcttcatagaatgagataggatatcggaggtttggtttaatctgtcagtggcggccattttgaaatctattatgttgtgaattattgtcgttagtgtagtaaaagagagaatatggaaactcttcttataggactaggaatggtttgaatattaaaataagtgataaacgatcttaacgactctgtccgactacatcaccttgtgtcgttccttttatacctgtagttcatgactgattcggagctaactaaaatcggtccgcaactattttagggggggttggagcaggaaatgagtgatgacaacaacaacaacaacaacgataataataataacaacacgcattacattacaacattagctatgaagacgtaatatgagagggtcaaacggacgaaaaagggtcaaatgagagaaaaagggacaggaagttaggggaagcaagcggaaggggaccggctgttgggtcaaatgggtggtgttctttgggaagagggatgggacaagtggaacggtagaacagaggagaagggaaagaaggaaatggataaacacgtaattgataacgagaggggagggagattccttcgattgtcaccggtggaagtgtgcggcaatattagtggaagcgttgctacagacagcgggtaacgggcgatttctggtagcgcaagaaaaaaatagcggctgtcgtcgggttagaggggcaagaggggaagaaaaaaaaaacaagatcactcggaaaaacaaggaaattttcggaatgcgcaaattacgatctaccggagttttggtcagttcttgtttctatttcggagaaatccgcattgggtgtatatgtgtttacacacgtatggatttttccgataatcgttcttgcatgagacgctaatgggacagacatatgcaattggtcaatgtcccactgtccgagaagaacggctgtagggtgtgtaggcccacacgtaccgccatgtgctaccgctaggtcgatctggaaagaaccggaaggaaaaactgcccttggcggctagttgtgtcatgcatggtgcacgtgcgagctcttttcttttttcttcagtttctgttccatttgcgcttgtctctcggggccggacagagggtggaaagaagtgtcattaacacgtgtcacctccgcccagtttcgaattacgtaaatgccgtttcagattcggtaaaaatagggcaattacgtattagggccaggaatgcgggcttggtgtaccgttagaacacggtggaaggttacaagaagttcgaatggtgagactcacgtgaggaggaagcagaaggatccacgtgagtgctccgggcaagaaagcgggacgtcattagtgactgaagaaaaaaagatgcgagctccatctcatcgatattactactgaggatggtgcgcattctacgtatggttagttattctaagagcccatcaatcgtaatttcgtcgttatgaagtacgttattgaacatatggagcatggcttcagtgagtgggtcacattggaatatgcacaaataattagagaagttggttctgaaaatttaatattgtcatcgctcccacaaggtacggagactaaagacataccgcaacagctgttggaattggggctaagatggacaacttgcgatctgttacatttacgggaatcgtttcaggatctggtgccattgagcaatggtcgtgtctgtctgctggatccaagagcgtcacaagatatccaacctgatgaaagcgcaagttttgattattttgtatttgggggcattttgggtgatcacccaccgagggatcgtacaagtgaaattaagaaccaatatccgaatttagttgtcgggcgtcgtttaggtgataaacagatgactacagatacggccgtaagaaccacacaactaatagtcgagaagaaggttgcactagacaagattagattcattgattatcctgagtttcggttcaatgcaaatgaagcgactgagatgccatttcgttacgtaattgacgaaaagggggagccaattctgcctgcaggtatgatggaattgatcaagaaagattcagaacagtctttggatgatttattgtagagtaatgatatttttttgtgtttttttaaaaaaaggaaaatgaaagaataaaggctatacgaagggagggtctatttcttatcttgagactcctgttggacgaagtcgttgattatcttttccacattgatgtcgtcattaccgttagcattggcaggagtagaaggttgctccttcttaccaccgctactggcaaaagcaccaataccagcaacactacctaaagtcaaaagggctaaaatgtgtggttgaacttgcttgccaaagatggtgtaagcactgcccattgtttatatgtcttttttttttttgttttacttaattgtttgattcaacaggagaagaagaagtagtattgtaggtgttactgcttacaaaccttcttcgattctttctcttggtagttgtagatggcactatgtccgtgatcgaaccctgcctggctttctcccttcttccaatgaactgaacggtaaatggagggcacgtgagtctgtggtgtgtgggtgaagctgttctgattagttacttgtttgtttctcgcccgtttcttgtttgacatgaggtttctggtaaaaatttcttggacaccagcataacaacacaccagggataagccctaggctcgaaggaattagggcatcgtgacggttgtcggttgtcgcatgtgtagagggtgtagctgttaattctgcatcgaagaaagtagagattcacgaaagtactggggatttagataaaggtagcaggtatgctctgtgtgttttagcattatcattgcccacataacttctcgaccactcgatttcatagcgaactaactcgcattccagcggcagatcactatatagccgccgacggggtaacactgcaagtaacgtaaaacacgacagaatcttctggaaaaaaaaaaaattcatgcggaccaagggttgaagaatataaaatcatcgatattcttccccaccctatcctccaaactcttgagtcgagatatccaaagctgacaccgtcggttcaccaatccttttatcgttataatgtctactcttctaagatccgccaagtccattgcccccctattggaccgtgttcttgttcaaagaatcaaggcccaaccaaagactgcatcaggtctttacttgcccgagaagaacgtggaaaagttgaaccaagctaaggttcttgccgtaggtcctggttttaccgataacaatggtaacaaagttacccctcaggtgcaagctggtgatcaagtgttgatcccacaattcggtggatccaccatcaaattgcaaagcgacgaagaggttttgttgttcagagacaccgaaattttggctaaaattaacgagtaggctctttataatgacgtgcatgtaaatagagatttaccaaataaacaacgggtcatttgccattgattgacgttatcaaatgttcggcgttacgctgtcgcagtaactcttccatctcttgtctgtcttgacatattttcatgaaaaacggtccccatgatggtccttcccattcaccttcccatactttctcggcatggtttccgctcatatcagcggtttcatgtgtctctttgttctcaaaagtttcatcccaatggattcttctagtgactagtttatcatagaatttacaggacttctcgctgcccacgataacaatgattccgctaccattttcaccaactctaagacataatccttttaacgagagctgttgggcgttggtctttagtttaaatcttatacgagggttactcaagttctgaaatcggaacactttacaatgatcaccaggagttatggtctcgttcttagcttttttgttctgttgcgcttcttcatgtctagcggcattcatctcttcgtgttttctctttcttgatgctacttgctgtctcacagtcgattcccatgctgtagggtccgtaatgttttggttattttcataaacgctcatcatattcctcaatgatactttgggctcaagtttcggttccaaccccatcttaatccttgtctcatgttcctcccgttgcaatttccttctattacgacgaatccttttctgttcacttttagtcaaataaactttagccacaggtcgagaactatcagcttttataggtacaggatgttcgacgtatctaatggaaggacgttcatcgtcctcatcctcactttcttcatcgtcggcggcaattgtatcagcggtatacttggataaaatgtttaattgatcatctaaaaatggtttgtcccaccattccactattggaacttctctaggtgcaaatttctcttcgccaatactggtatctggcaattcaccacattccactttcttcctcacctcttctcgacgctgtgcttcaaattccctccttttgagttcctgttccttttcagccttcagcagttctctctcacgctcaatattggcactaatttcacctttttcatggaattttaaacctttttcaaaccttttacgtatctttttatcctcgacaccatatgtgcttaaatatggattttgtcctcgatactgtcttctgattagatttgggttggacgacaataagagaggattaatttcagtttgtaatccacggttacgacccttagcggagtcatctttctttgctggcattgcttagatgtgattttatggataaggtaatgtttgaagattgattttcaccattaagaaatttcaccgactttaatctaattctagccctaatacacggaatatattcaaaaatatatatatatatatatatgaaaactaatgacgctaaaaaacagaaataacttcaacaatatccttgtaacatcaatccctggtatatatcagcatattacccttaccacccgaaaaacgacctcttcttcttgccctcttgaggacttttcacgctactacgttcaccgtcactgtcgctactgctgcgtctactgtgagaatggcttcttgagccgctagggattaaaaatgataataacccaccaccaccgctgcttttcttggaatgacgattacgacgtgatgaagaagaacgagatcctggcactgatcccgatgaatgtattggcaataatgaatttgaatcattggatttaactcttgccacgttattagcacttacaaccttacgcaatggtaccgtaccatccccagtactaaccctgcgtagttcttcctcattataaggctttcccgcgccatctatttgattgtaggagtaagattgtgagcctaaagaaggacgagccacgtccagatagcctttaccacgagaattacccaacgccttattaccatccttggcatttacatttggggcaaacttaatttgaccagaacgaggttttcggcgaggggcagttgaacgcttgtgatgatcagggctgtcagggcctggcgtatcgagaacgtcaagcatcgattttttagaattgggtaaaactctagtacttccagtgataactctcttcaattgatttagctcttcaccttcatcgcctttgaaatcctcttcagtgatactctttagttcttcagaaaattccaatgtttccttaatgatactatccagggctcccactttcttctgggcataatctaacttatcattggattcaacactctgcaattccttcatcatattttttctatgtattagtctagccgaacttaatttttcacttactgtcatatcatctttatcagaataatcgccactgtcttcaccactatcatcatcagtatcatagtcaacgctactcttttcggcgctagaataatttaatactaacgaatctctggaatcaaaattggatggttcagtcttcgttctactcaaagtctccatggtaagaggagaaggttttaattcttcagcagttataccgcccacgtctgtaacctttggtaaaaattctctttccatttttgcttcaaaatcgtacaatctctttgctggcacgataaatactgggacggagaacttggtacaaagaacatccttaagaaacctagatttgtaaacaaccaatttatctgttctttcccatttcaaagtaccttcaacacagaaatctggtgtgtagcagttgactgcatctaccataactttcttagtcttcccaacaactacatccacggtaatctttacggctaatttgggtggcaatataactttaatgtactcaaatatatccataatcttactttccacatcatatctattataaccagatgaccatccgataaagttttgatggatcgtttcattttccccactattaggtcctacagataacgatctgtattgagaacttccacctcgaatcttcgatcttgacctgtcatttacactgcttgaaaatcttggtaaacttgccacaacaacgatgtaatcagtatcttgagccaattgccgcagagcccaatctaatgcaacccaggtatgacgtctgccgctaatgtgacacaaaatagttctagggttcggtagatgtcccaattttaaatttaaaactttctccttacgtctctgttccttggacaatggtataaatccatcactactcatcacagcagatttcgtacctgttggagggaaaagaatagtaggatattgaaaccatttgtatttttcatctaatttagcagcaaaatatgcctttttttcgttccacaaatggtgccattgattttttgactttgtcaatatcaaggcatcgttaaagattgcaggttcactggggtaatcaactctaacaattttaccattttccgaccttttgaaagattccgccagagacttatgggtcaaccttttattctgagatgccggtcctcgtggtgaataataatcgttatgggtatttgcaacagtacgagcaattccttcattgctgcaaagatcgtctaatgagaactcaggtggaatctgaacacctgggaaatccgctaatgggtcatctaatgcactgctacccagtgttaatggcaccgtattgaatgaaacacacggacggaattgcctctcatcattaggattgtatttgggatgcttggcgttgacctcggacaaatcagcatagagtttaatatgtctataagcattcttcaaaacgtcatcgttatcattttgcacagacatcttcacggtctctatcccaactggcttcctaattctcttgttctgtttttactgttcttcaattgtgaacaaaagtgtaattactcttgcagcgttagtcgtccttttacagttaggggaacgcttgaatgcagtaaaattcaagtaaaagaccgaagagcgacaatcagataaaatttagacaatacaaaggaaggagtcaaacttcagtggcttatcttgattattatgaatatgtttttgtgacgaacacttcttgtaactactactactactgctactgccactcatgttgtattaccgatgttaaccgctactactgtttttttgtttgtttttttcattttatccagcattgtgcctttcatcagggtcttacaactcattcctgactctttcatttctagtaaattctatcctgttactacctacgtgttatacacaattctatatttacagctttccgtgcctcgtttgcggttaaaaattagagttggacgatccagtccatcacatctttgatgaatccacccgtcttacagcttactgtgaaaatggcaatatctctgtctaacggtagtggttctgtagcactcccaaacggtacatgtagtaagcgatttcgcagatcgatacctagttgtttagatagagactctacgcttttcaactggtgtagatttgaaggttccaacttacagcattcaatggtatcgtagttgtagtctgtaagtaaagtttccggtaagcatcttgtcgaataattttggttcgcaattgcatcaggaattgcatcagtcttattgcccattataagtagaggaatcctatcatcgttggtcatttgaattactttagttaatttggtaaatgattcctccagagagtgtagatcgcttaaatctatcatgtatactatcaaatccactttgtcaaagcatctttcccacaatggttggaatctcgtttggcctgctaagtcataaacattgaccgagttattacctagcgtaaacttctctgattgaatgcccaatgtggggacagtgtcgacttgaaatggtttcccgctaagcaactgaacaaacgtcgtcttaccggaattttgtaatccaattacagctatactaagttccttttggaaaaggaagattgaagccactttataccaaatgtgttcgaaccatgacttcaaacacccccaatccatcatacttctcctacttctactacattaattgtatttagatacacacactatcagcataaaatttcgtaaactttatcaacgtttacaacgtcatcggaagtacatacgtgagaatctcgagaaacaaacaaaagtcttctagaaagaaataaaaaaatacagaaacaaaaacataaatcaattctctatattaccggttgcttcaactcttgctgccatccttgataatcttttcacaggtgcaaaaccttccaatatgccaaataaataccattctatgaggaagtccggtggaactctataaaactgcaatttaggtcttaaaaagatcaacgtttctgctaagtgcattaaaacttctaacaacattatagtccttaggataacatcgttatccagccattggcggatgtgtaatggtattggtaaccagtataataggggacggaacttgtaacacagcataggcaaaaaaacgcccaagagaaccaagtattcaatgaacgattgtgggtataccatatcattaatttggaaatgagctagatgacgttttgcggcggcttcacgagccatacgatttaatctagctgttgcctcagaacgatcttctaaaggtggctcaaatataattatcttttcaatatcgtattctatatctttatggttgaaaagaatcgtcatacattgtgaatcaagattcagtaaccgcacattcagaaccttctcagaggaagacacacctccaaatacgtagaggtagtcctctaaagccaacttgtgcttcttgttcatatttgctaataaatcctggacattaccaacagccatgatgctagacgagacagatagctcctatatgctccaattccgtttgccactggtgtaactatgaatggtcccttgtgtctactgatgtccttgatgagagccagagctcaacaattgaggtagtcacgtgaataagcgtcacgtggtacaccatgcaccaattgttcaacccgttcgttattggaactatgtatgagtgcataataatattgagcacttctagattgcaaataagtcctccgcaatactcattctacaccatcatgaattttatgcgagccccgcttatgcaatgatttacggagatttacgcctgaacatcaaaaaaaaagaccatggggccaaaaggaaaggacagtccctgctaagcaacatcgcaaaaagagcccgaggactgtatggcactaatgaattggtacctacagatgggcgctgtacctggaaggcatcctacaccacagcgggtgccattcaaagtaggacggttaaaacatcagtagtaaaccccgaaaggggcagttgattaatggcagaacatggccatattctatccagcactaagggtcttactcccttatcccgcagcacacccttgcaagaagcttccttacctgtgcctattctatacccttctcccgtgtcttgatgcacccaaccctccctcccaatcttcatcttgcggctgcgataatcgtcgcagtactgattaaggtacataccaagggtctctccaagacagaatagaccaccaaatgcgtactagataactggtcctttagggctctaatgactagtccatgtgtcatgtgacaggttccccatgatttttcccaataatgatttcactttttgcccttgaagaaagcaactaaacacactacatacaagcaaataaagtgcaaaagaagcccttcagatattgcatcgatagggaattgttgtggcgaggattattactgcagaaatcgactaaacgtctagtatactttgtaatagaatcttgttacaagacgtttttcggcctctcctctcgttcgttcaaataaaaggaaagttttagtttgaacaacaacgataaaaagaacaaaggtacgcattaaaaaggacaggatcacgctagaaaagagttgagctctgcaaacttagtttacaacttttacacaagaactcacagttttatttgcattcggttaatatgaacggttcggctgctgtaagtagttcagggaccggaagcagctcagagagacaccatcgtcatcatcaccataggcatcatcatcatggtcaaggaaatggtcattctcaacaaaatttgttggcagatggttctcacatcggtaactatcagatagtcaagactctaggtgaaggatcttttggtaaagtcaagctggcgtatcacattactactggccaaaaagtggctctgaagataataaacaagaaggtactggccaagagtgatatgcagggacgtattgaaagggaaatttcgtatcttagactgctgaggcatcctcatatcattaaactttacgatgtgattaaatctaaggacgaaatcattatggttattgagtacgcgggcaacgagttgttcgactacattgtacaaagggataaaatgagtgaggaagaagctcgcaggttcttccaacagattatcagtgctgtggagtactgccacagacacaagattgttcacagagatttgaagcccgagaacttgcttttggatgaacatttgaatgttaagatcgcggattttggtctttcgaacattatgacggacggaaatttcctgaagacatcgtgtggttcacctaattatgccgcaccggaagtgatcagtgggaaactgtatgctggaccagaagtggacgtttggtcatcaggtgtaattctttatgtgatgctttgtcgtagactaccatttgacgatgagagtataccggttttgttcaaaaatattagcaatggtgtttacactctaccaaagtttttatccgaaggagcggctggtttgattaagcgtatgcttatcgtgaatccgttgaacagaattagcattttagagataatgcaggacgactggtttaaagtaggtttaccaacttatttgattccaccagaattaaagcagcaagagcaggaacaacagcagcagcaggaacaacacgatgacggtacaaagaacaatagtgaagaaattgacgatgaattggttactgcactttccaagactatgggctacgatagggatgaaatttatgagtctttagagagtcgtgatagaacctcggttttaaatgaaattagagaggcttacatgttaatcaaggagaataaatcgttgatcaaagatttgaagtctgacagagatcggagcgatgagttggatacatttttggcgcaatcaccaccaaccttccaacaacgaggtgatcaaaatttaccaccggtccccccactacaactgcagagttctccgcaacagcatcagccaaatgtatctagaaaaattgcaacccagcagagggcttacaatgtagcaccattcaacgatacaaataatgaagaagattcaacaatttccatcctgcccacgtctcttcctcaaattcaccgagctaatatgttagctcaaggtttaccggcagcatcaaaaatttcaccattggtaaacaaaaaatcaaagacgaggtggcatttcggtatcagatcgagatcttatccattagatgtcatgggcgaaatatacatagccttaaagaatttaggtgctcagtgggcaaaaccttcggaagaagatctttggactattagggttcgttggaaatacgatgtgggacaaaaccataatgagcgcattccagatctaatgaaaatggttattcaactgtttcaaatcgaaactaataactatttggtagattttaaattcgatggttgggagagtagtagtggtgaagtagcccataatccaaatttatccgaggatgaaatgagtactttctcagcatacccattcttacatcttactacaagactcatcatggaattagcagtcaacagtcaaggtggatgaactcgccgggcaaacttattaatacgtaagagtgaaagagagtatatgaactctttgccttacttttttgctagcagcgaatttattcgagtacaaacacagtgaaatgaccaagggacatgctggagaggaagatattaaaaaaaaattcttagcgacgtttatatagatgccttcaataagagagatgtcttcaaatatctaaaaacaagtactattactattacaccgatatgtgacgattgtgccttgtattcgggtaattctctctacggagcgcccttccgcaatgggaaaattgtcaataataaagaaggtttggtgcaaagaacgtttgcatcagtttccttgaaaacgtttactagtactattgatacagttaccgttctttttggtattgatttaggttaaagtttaggcacaggcgttattaagtttattcaactttggatcgattgcttagcatttggtccagtacgtctcaaatacaaaataaaatatggtatccctgctgctaagtcaatcatcaagggaatcttcctttgatgaaagtgatgcatcgatgggtagtcgcttaacccctcagaaaaatcaaactacttctcctaaacttgacttaagaacggaaagactatatgtgattaaagaattagataccaatgatgagaaattaatacagattaacaaaatgttgaatagatcgagaaaaattactgttttgacgggagctggaatatcatgtaatgcgggcatacctgattttagatcatcgtcaggactttatgaaatggttaaaaagcaattcccagagatttcaatgagatcaggccaggaaatgtttgacatttcactatttagagatgaattgaaaatttccatgtttgctacgtttatggaaaagttgtactctagcgttaaattggcacaacctaccaaaactcatagattcattgctcatttgaaaaatagaaataaacttctgagatgttatacccaaaatatcgatggattagaggaaaatttaggattggagatgtcgactaacgaacaggatccaggtgtaattggcacaagttttaatgcacgttggaagaattacgatgtggtacaactacatggtgatttaaaaacgttggcatgtacgagatgtttccacgtcttcccatggaatagatactggtgccggtcatttagaagaggtgaattacctacttgtccacagtgtgaagagaaaaattttaaacgttgtcaagaaggtaaaagacagattgataatactggttgtctaaggcccaatattgttttatatggggaaaaccatccgtcatcagactcaatagctcaaggcttaaatttagacatttcaagaggtcgctcagattttttcattattctgggaacaagcttgaaagtagatgggataaggaaggtcgttagacaaatagctaaacaagtgcatgaacgtggtggaattgtccttctgataaataagacaagtattggagattcttcgtggcatggtctcatagactatcaaattttaacggattgtgacagttgggtcgcccatttgcaagaacaattaccggattttttcaagacccaggaaactatagatagacagaagatgttgaagcgagaatcaagcgatttgcggaagaagaaggctgctgaacaattggctaaaaaccacattaaaacacctcctgctacgccgagcagggtgaagtcagaacaagaagaaacttcaaagaatagtattcaaaatgttaaaaagagattactgaacgtcaacgatgaaataccgtctaaaaaatctagaacaaaccaagctccaatagagtctccatccacgtatgccaatccctgagattttctttagctcataacatggttggtttgtattatttaatataactgttccctcatatattagtttatttcatcgtcaagctcatcgcgcatacaaaaaagattgacgacaacaatactgcattacatactctgtacatagaaaagcacacctgttttcgagatgtctatgaatcgatctcaagctgagaagtttaaagatatccatctaaatcacaagtacaacttaatccatatgctgccgtcaactgaagtacctgcattgtcaggtttctatctgaaaagtttttataatggtactaaaagatatcgactaaggttacctgaatccattgttgagccagatagcaaattttgtggtaattgtggtgctgtgagaattcctcttttcaacacggatatgtctataacagaatccaacaatgaggccaccagtgaatctacgagaactttacagtatacatgtctacactgtaagaatcaggcacaagtggcacccgttagagtacagaagcagacgccagtgaatgttaagcaaagtgtaggagctaaagaagaggagcaaaagcaagataaagtgaataagaaaacctcttcagctagagaaagggcaaagaagaggaagaagagcacactctctgatatgttatctcaaaagaacgaagagaaaaagagcaaatcgttttccttgagccttgaaagtatgatacagaatgattaacttgacggaagaaaacttatagagattggaaactaattatacaattggattaaaaatatgcggcgcctataccgtcatgtttagtagatcggtgagactgcctagaccgctgaatgattcaccctttggaagtttctttggacttgcagggctaatcacgctgttgatagaattgtttgattcgcttctatctattgcgggtttagtctcttcagaatgggtcgatgatcctgacatcgaatctctactaaccctacggtggccgtgtgaatagttttctaccctagctaaattgaccatatcgtcttcttctactacttcttcttcttctccgttcgtatcgacataatggtaatccatctgtcttgcgcacacgttagtccacatccgtctacggtatccacctctcttaccttccaaagttaaatcgtaaacccacttagtacccatatcgatatcgacatattgtataaatccctgttctacccattctatgggttctaaatctaatgcccatgagtcttcagcttcaacccattcccattctactggtggtttaacttcttctaaagttggcgcacagtgaagtgcaatgtcctcctgttctattcgcaaatctgagaacaaagtgtaatcatcgttagaaaaacctactaaaacccaacatttatccttttcagagaatttttggatttcaaagaccgatactaatttattctctctaacttctgtgtatcgcaggtgttcattaatgatattttcaaatctattggtgagagttaacactctgagtcttgtttcttctgaattaaccctggataaaaaccattccctaaattttggatgaagcataaaggccaagaaccatccaaaagccacaaaaaaacctttgaccggtagatgtttgctcagagtgtccaggaaaagggcatttattaagcctaccactaacagtatgaaaaatacagcagtagagattttttcatttgtaaaataggcaaatttcgtcaaccacacacttatgaaatcatagaaagagacatatatcatcatgtggttttgcagatcagtcagatttagtatgaattcttggctcaattctgggaccggtttaggtaccacaggtttcctcagaggtagaccttgggcaggtgttgggtttccatccaaatacatggagtaattgggtttatgcatgtaaagataatgagggaccataactccaaacagaaggtaaaatatgggtaacgaagtgagtgtgggtaaaggtttcataactgcatgtgtataaatcaacataatcgaaatagtgtaggctgggtttgcccaactgaaaacttcaattatctcatcaagtatagcaaagggctgacttaatctagcattcatcagtctaaaatttcgactcattgtgttgacagacaaaccaggtctatccttagcaaactgtttcctctttgccaaactgtttatagcaacatctgaccctggtgggagtgccatcctcattatcttctccacaaggttgtccgttagcagtttttggataccagcactagagagacttgagccactaccattaccagcactgctactaccagtagatgtggccccaccagagctagatccactaggtttcccactacccagtttcacactcatacacgtttgcttttaccaatggttttgatctgaatttaatttgatttgatttaggctaaggtttaaccttcaagggaaagggcaatataaaaatcaacaacagtagttcgaatcacacctatgctaatccaatagatcactcagtctcgatggaatttggtttaacttttctaataggcctttaaaccaatatatattcgcccttatagttgtaaatcgtcaaatgttattgttataaggaagtgcctttgatgttatgttgaacaaagccgatttcaacaaatagtaaaatacacttaagttgttaaagagctaagaagttgaggatggctgttcacgatgtggtggaggttgatgaagttgccgaagattatttaagtgacgtagttattatgggatccctacgacagctagttgtaacagcttgggatggtacgctttcaatatatgattatgatgaacaagaaagaagggttagtctgaatactgtgctgcgacatgctttcccattattgagctgctgcgtacttttccccagtggtggttacaagccagagatatattgtggtgatgtacagggccaagtcctattggtagatttagaattgggaaaattcataccaatggggggcaatacagctcagttgggaatttccagtctttgcagttataagaatcaagtcatatgtggatcttgggatggctttttacaagttattgattgtcgaagtcaaaatgttgtgtatcagcagcggttgaatgataaaatattgagcatagatgcacatggagacaagctggtagttgccactacgaagaatacggtgctttggtggaaattgcccttgcaggctagtgattttggtgcagaagtggaatcaggactaaagtttcagacaagacgtataaaattgacaccgagaggtgatggatacgtttccagctcattggatggacgtgtggctgtagaatttttccaagatgatacaaagaagtttgcctttagatgtcatcgaatgaatttggctgatacgagttttgtattccccgtcaatgcattagcgtttgtaccgaattccactattctatatactggtggatcagatggatgtgtgtcttgttggaatttagctacgagaaagaaagtggatcaattggcaaaatttaatgaaaacagtgtcgtacagctggactgtgacggtaaaattctttgtgtggccacttctgatgactctttcaaaacgaatgcagttgttaaccaagatacggaattacaagctagtagactctatttagtattcttaaactaggactaggaagctaatgcgtacgttttctcttggactcgtttttagtcttttgagcaggtgcaactcttttctttaaaatattatccataagcttaacatcgtctatgacttggaatttttcccccaaggaaaggtaacaattttgtagggattctacttcactttgtagcactctttgagccataatccctctctgaacatccacatcatgtacatattgatgaattggtgttacttctctgaaggaatggtttggatattgccgtagacgttcgtctatgcagtgttcgaacaatttcaagcatttgattgtcagacgaccactttccactagctgtaagcactttttaaccactctttgcaactctctctctaaattttcacctacattggggatctgtaaaataaccgttagaacttgtaagagtaacaggcattcaggaataacctggccatcaatgaagcaatcataggactctaggacgatctgctcctggtccaaatgttctaagatagtttcatcattctgtaataactgcaaacagatttgaaagaattcctctggtgcttctctttgcaatacttgtgtaatacatgacaacggcagttcaccaaaatcaaattgagatccatcccattccacataaccgtatcttcttaagatttctgcgttaggatgttcaccataaaaattgtaaacttgttggcccatcttgataggtttcacagaaaccatctttaaactttctttatcgtaaaccaagtgtgcgttgaattgttttgtatctgcatttagagtatctgccaaagggaccatcgatttcatatatttatcatgggccacattcgattccccttcttcttcttcgccctcatcttcatcctcatcatcttcatcatcttcaccctttaaatccacatcaaatgaatatgacatgataacacttgccacatgcacaaattcttcaaatgtcaattggccaattttcgattgaaattcggggccaaagttttgtatgtattttagtatttggcggtacatttcttgagattcgtcggctcccaatctacccaccactagagaaggctctaatgccgccaactgatcagcggaccagtataccaaagtattcagatcttgggattttggtagcacttgtaaatagttccaccagaaactctgttgtcccatcactttaatctcgtaaaccatacaaaggattaaaccttcccaatgtcccaattcctgccaaaatacatcttttagctgcgggaaatcacgaacaagttgagaagtcgccacgtttagaactgaagatctggggatctcaaatagcacttcatcagagcctatatcctgggacgcaagcacacatctaccttgatttacacttcgcaaatcaccaacgaatatcttgggggaaatttcaattctggcagaggatactaaccaatgataaaatccatctgtggcttcatcgaatgacgccatcatatcctcaatataatacttcaaaaggcctattagttgtctttatccttgttattgttggtgataatatgagatgcgatgagcttggaatttttcactcaccgttaacgacgtagaaagttccagaatggtgaaaacttcaacctcccttgaagtataaaaaggacccgaattccgatagtcgatagcgtatcatctgccaatagtccatcggcaaataaccaatctgagattagaatgagcgctgatgaatttaagcagcaaggtaatgctgcatttcttgcaaaagattatgtgaaggctatcgatctttttaccaaggccattgaagtttcagaaaccccaaaccacgttctatattccaacaggtctgcatgctatgcatctaacaagaagtttgaagaggcattgaaagatgctgaggagtgtgttaagattagtcctagctggtctaaaggttataacagagtgggagccgcccaatttggtctttctcaattggatgaagctgagaagagttacaagagagcattagaattggattccagtaataaggctgcaaaagatgggttagaacatgtgcaaagtgcaaaggcaggtcctcaaatgccagatttaggtctttctcaaatgtttaacgaccctaatttgatccaaaatttgaagaataatccaaagactgctgatatgatgaaagatccacaattggtggctaaattagaaggttacaggaataacccacagtcaatcagtcaggatctcttcaccgacaaaaggttaatgactattatggctgccttgttgggtattgacttgaacatgggtgatcctagtgctggtagtgaggcacaagaatctgccaagccaaaagaaccagaatcaaatccagaacctagaaaagaaccaaaacaagagccaaagcaagaaccagaagccatggaagttgatgaagaacctaactccagagttgccgcagaagcggagaaagccgaaggtaataagctttacaaagcccgtcaatttgaagaggccatcgaacattacaacaaggcctgggaattacacaaggatatcacttacttgaacaaccgttctgcagctgaattcgaaaaaggtgattacgatactgcaatcaagactttgaatgatgccgtggaacaaggtagggaattgagggctgattacaagactattgccaagtcattcgctcgtattggtaatgcttactacaagttgaaagatttgaggaaagcaattgaacattacaacagatctttgactgagcacagaactgctgaagttctcaacaaactgagatccactgagaaggagctaaagaaagccgaatctgaagcctacgtcaatcctgaaaaggcagaagaagctcgtttacaaggtaaggaattcttcaccaagggtgattggccaaatgctgtcaaggcttacacagaaatggttaagagagctcctcaagatgccagaggtttctccaacagagctgctgcattggcaaaactaatgtctttccctgaagctatcgaagattgtaacaaagctgtttccattgatccaaatttcgtcagagcttacattagaaaggcaactgctcaaattgctgtcaaagaatttgcagccgctattgagactctaaacattgctcgtgaaaaggacgctcaagtaaacaagggtgctaacgttagagaaattgatcaactacatgccaaggcttccagtcaaagattccaaccagctagtgacaacgaaactccagaacagacttacgaaagagcaatgagagatcctgaagttgcatctatcatgaaagaccctgtgatgcaaagtatcttatctcaagctcaacaagatcctgctgctctacaggaacacatcaagaatcctgaagtgttcaacaagattcaagttttgatccaagcaggtatcatccgtactcgttaataatatcttaggtaatttttatatatatgcatggaatattacgactgtattatgtttgtcgatacctatattcaattatcaatctttcttcttccctaacatttgtaaagtcctccaataaaataatacaactgctagtttaccattcatcatgtttaaattaatagtgcgctcgcctctcaattttatgttatgtagcgaacgagttgtattcgataaataaaaaaagcattacttgacaagtaagaaaaacaaaaggaagatgacattgcacgatttattcggcctaagaaaagaaaacatactgttcacaatcttattccgaattacgctgatcaatcaaactaactttccgtagtttcctagttataatgtgaaatcgtcgccttgtcgtgaacaccactacaaattgctttcaggaatgtgttaccccattgcaagcaaaactaacgcaagacattttaccaaattcacaaggtaatcgatcagggactcaattatcgttataattaaacactttttgataagaatatcatcgacttattagtaacaaaaggacccaatctagtgaaacactctagtgaaagtaaagctattcttgatattcatcttatagatttccatttaaatatctacctctgttgtgagagccaaatttgtacgccaatcccacattaaggttactttttgcatgtttttcttatcgcattgtttctacgcagagaacatccaagcggtgtaaatcctattgttaaaaaagtttctagaacgcgagttgtctctctttagccttaatggataatttttcttggaaggtgtgcattatatagaactaacattcctccaccagcatactcttgaagaataactattctttttacggataaagcaacgattactatcgcttgaagatgacttacggccttgagtttatgatttctgtaggggtagctctcgaataccctttgaaatctattgtaatatgctacatttcagcccatgaacttgactgaaatgggtaatttttctttttgaaattcatttttaaatggctactgaatgcacatcaccttggtatgttgtaaagagtccattggggaggaagtcgctttcttatatctacaatctttagcaaagtggccaattttattacaattgtaacaatgattgatttttctcaaaaattgattaccttcctgcgagttcgaactgatatcgtttattctttgtaaagcccttgaatcttttgtgagtggatcttcggtaattttgttattacgttgggcggtatcacgagaatgctttctatccacgggagttccatagtcctctgccgttgctagctccatcgcttccacacatgtttgggttccttatgatttacagctctttctacttggtcttgaagccctatggtatatatttgtacgaccatttcctcatctaaattttgttggatctctaggtctttcaaagcttctccaaatgcaaggttatagtcctggacagatccttattgacgagtctgtaatagttcttttaggacaagcaatcttcatctttctcctctgcttcttcttcaactatatctttaattgaacttttaaaaatagtaccatagtggctgttcggaagattagcggcaactaaaagatgaaatgacccagggcccaattacttatataagaatatgatatatttcagaatagggcaccaatatctgactatgtgatctctaaatacttggtttcctctcatcgatccacatatcagatcttaatctaatctaagacctcattatatattaacattatcgtaagtgacacgagggcattaatcaagggcacacctatcacccaattgaggtcaaacttcatgtagcttcatgatgtgtgacaaaagactatccaatacttaacccgtaagtatcccaaccaggaactatacggaataatctaacagccagggactagatctaagagactggtattggtcgagcattatactcttaaaggggacaataatatatatagagatcaacaatcggatactagagttcctagctaaacaatctatatcgttttaacaagtaaccggattttaggtcactacaaaatgtgattatatccattgattggaaactactataaactactaaaacttagaagcgttttatgggcatatggcgcagttggtagcgcgtctcccttgcaaggagaaggtcatcggttcgaatccggttgtgtccaatatttttctttttgccaattttttctatacacttttcaagacgacaattctaattttgaaatagctctcatttactcctccattccatatctaccgcgacaatccaacaattagagaaattgtagtaagatcactaaactgagtaaaatttttaatcacatgattgtacatacttgagtagacctggaaaaacgtttgtctattccaacaggtcttattcctcgtggcccaatggtcacggcgtccggctacgaaccggaagattccaggttcgagtcctggcggggaaggcttaatttttttctttttattcaataattcagaacccattattccaaaaccccgcttgctagttccagacataatgcagtagaattaagctactcgggctatggacactaacatataattccttggctaatttggatactcttaagagtctcaagacatattatgggacattttttactcaacatcatacgtagtagccaaatccgacggtgcttctatcaaagttacggaaaaggcaaattgtaagagccctataggcctcaagtatttgaatttcaagatcaagatagttgacaaatgttaaatgctattggtcaatgatacatcgattcattaactgaaatcaatctgcttgttcaatatacactaatccgtcataccgacttcaatcatcaatcattagactcatcggggctcgacttccgaatcgttgatattgaaattataagggtatataacacagcgagttctcgaacagtacgagccaatttctccaattaccgtggatatacatataagagactttaacttagactatactaaccctataacgatgtcacaaggtgtcaaagctgctgaaagactagctggtaagactgtattcattacaggtgcttctgcaggtatcggtcaagcaactgcaaaggaatatttggatgcatccaatggtcaaattaaattgatcttggctgcaagaagattagagaaattacacgagtttaaagaacaaactacaaagagttacccaagcgctcaagtccacattggtaaattggacgtcactgcaattgacaccataaaaccatttttggataaattaccaaaggaatttcaagatatcgatattttgatcaacaatgccggtaaggcattaggtactgataaagttggtgatattgcagatgaagacgtggaaggtatgttcgacaccaatgtcttggggttaatcaaagttactcaagctgttttacctatcttcaaaagaaaaaattctggtgatgtcgttaacattagttcggttgctggtagagaggcatacccaggtggttccatttactgtgctactaaacacgctgttaaggcattcactgaaagtttgcgtaaggaattagtcgatacaaaaatcagagtcatgagtattgatcctggtaatgtagagaccgaattttctatggttagattccgtggtgatacagaaaaggcaaagaaggtttaccaagacactgtcccattatatgcagatgacattgcagatttaatcgtctatgcaacctctagaaagcaaaacactgtcattgctgacactttgatcttctcttctaaccaggcatcaccataccacctctacagaggctctcaagacaaaaccaattgaaaagcaagaacaattataacatctgtttatatcccttatgtattaccgataaaaaaaaaaaatctcattgctaattccttccattactctaatttctctaattgagattcaaattgttcgtaagtaattgcacttttgttaccttcataccttatcacttggacaaaatattgttcataatgatccaaaacctcttgcaaatgagaactaacaccagctttgtagattaaatttaaaaacgtttcctctttatcccagttttgttccgacattacctcaggtaggaaggttgcactcaatgtaatacctgaacctggatccttgaagaaaagttcaattccatgtaatccaatttcccaatcgttgatatcacccttagaaccttcataaattgtggtaaaattttgtaggatattacagctgcattttaataactgtaattctttcttagagatcggtggaaatctgttatcctgtaaagctgccaccaatgaatatttttcaattccatgaaccagggcaggcctggcaaatgtaccaatacaacctcttaaactgtatttatctgatttcttagattttttattccaggtaataaataatgaggtcctctcaacggggttgactctataatctggatataatgtttgacaaatctttaagaagttcttcgttgaattaagggagtgcgatttattattgttattcaaatagttgtaaagggtatagaaagcataaaaagcatatggggaggttcctgataattcaagtgacatgatacactcaatgataagtaattaaaactattgtagggttggtctcaaatttattctccctttgttagtgtttgaagtaagagatgtgatgagcttcggtgaaaaaaaagtggctacttagttaaacttaaaggtgtcagtcatcttgaacagatcgtcgtgaatcaaaccaaaccatcagatgatcaagatgtgggtctttaaagtgctaatatttttcatgatccaatgttcaaatcttgtatgggctcaaaacttctacgacgaggatccacatctaatcgaacttacaccaaagaattttgacaaagtgattcatagaaccaattacacatccgttgtagaattctacgcaccatggtgtggctactgtaaacagttaaaacctgttatgaagaaagttgctaaaaaattggatggtattgtccaagttgcatctgttaattgtgatttacccaagaataagcagttatgtgcagagcatagaatccaaggattcccaaccctgatggtctttagaccccccaagattgatatgtcaaaaccacattcacaaagagtggaattgaggaatcatgctggcgaagtttataaaggtgaaagaaaaatggccccaattatagattttgccgtatcaagaatgaagaattacgttaaaaggttgttgaacgtgaataaactggaagaaatattcaaaaaatctaccagaccctccatggtacttttctccaagaaggataagttatcaccggtttacaaaagcattgcattggattggttgggagtcttcaactgtttcataatccccaatggcaagctggattcgctatcatcggatgacaacttagctaaatcataccctaacatttatggtttcttgcaaagtatcgctcatgaccagaaaaatagtgagaaaagcctactagtagtctttgaccctcataatgaccaatatcatgtcttccaaggtgactcactagtaaaaccacaggtttctaagttcttaaccggatccattggtcgcaatcctcaagagggaccaggtagtaaacgccaacagtttgtcgatgccgtcaaaagcggtaagaacaagagggtaaaccatgatgaattgtaataaatgatgagatgtatagcttataacgcaccaatttcatacacaggagaaaatatcatcattatgtatctaaaatttgtgcatttttttactatgcaagctgtctaagctcatcgattttttccactttccgtctattaaaaaattatcaacttgagttgagtaagatcatcacgaaatacaataaaatagattcgaaaagcccagaatgatcactaaatacttctcgaaggtcgtcgtaaaattcaatccattttctaaagaaggtatgttccaaattttgagatgctatcagcgttgaatagtcctttaatgactagtttgttgtcaacagtgtatactaacaaaaatatctaaaaccagccaaaacagctagactcttgctcagttcgattccaccagctcagagacagctaggtactcagatacaaaatgaagttctaactaatgcctccaacaaagcacctgtgattaaggtaacatttaaggacaagaaaactatggaggtagatccaacaaaatacaccttccaagaattagcaaattattttgatacgcattccagacagttaagtttgaaagaaaccatcgaaaatagttagtcttcgatgatgagattattttccttgtaaatagtggtataatcaattgtataagaagcaagaaagaacaaaaaaatatcaaaaaaagtaaagagacggactagctactgaaatgcttggaattgaaactcttcgtatatgtgtgaggtctgattaaatggtaaaaatctacaggaggctgttgaagctgtattcttgaatagttccacagctaggccacctaggaatgcagaaaaaaatctgtcagtttaaaaaaagctaattgaaagtcttcaaagcatttgaagccttcaaataatcatttcatcaatgtatggtctactgacactttgtattgccaagtttctcaaagtccgtaatgtgcgactcattgaaaaattgtacaagcgatgagatgcgatgagctacaagaataactactgtaaatatcagatattcaagagcttctaagatattcatgtcgtattatttcaagaatatcaaacctggggtcgaatctgaatctgatgaaggagaagatctagaaagattacttagaagaaacaaccaagatgatgccgatgagtctagcgatgatgaactaagaacactatcatttggatctttaaagaaagctgatactatgatgaagaaggaagaagacggtgatagaaaattgaatcgtaaaataaaggataaaccaagtaagcaagtcaagtatgaatcagaacaagaatccgcaccagaacaagaatccgagtcagaatcaggatcttcagattcagagttctttgaagaagaaagttctaagaagaatggtgaccaaaagaagaagaagaagaggagtaagcatgcccctgctgagcaatctgctaagaaacgagtatctaaagtaagagaaattccaggtttgcatctatcaaagagtcaaaatccaaacctataccaagatatcagatttgataaatccacaggtgggcccactgatagcagtgtcattagacgacgctatggattcttagacgaatatagacaaaaggaaattgaagagatggaatccatattgcacgatcgtaaattgacctctaaactaccgccagaggaagtcgaatccattgaaagaagactaaaaagtactaaatcaagattacagactatgaagagtaaagacttggaacagaacattgtcaaggactatgaacagacaatgaacaaagacaataagaataaattccatctaaagcgttctgaaagacgtaaactagtgcagaagtggaagtttgaacacatgaagtcgaagcaacgtgagaaagttatggagagaaagagaaagaagagattgggtaaagaatttaaacaatttgaattcaacaaatgatgtactatatgaatatatacatgtaaaactttttttattactctggcttgattttatcccctccattggcgagccaatcattaacagaaccttcatagataccagtatttttgaagccataagaccttgccaattcttctgctgctctggctctcatacccttggcacagaagaaaatcaattcttcgttgttctttggtttaggaacttgaaattgttcttcaaactcttcttctggtaatgaaagagctgatggtgtagtttgaaatggcaaattaagggccgtaggcatcttatacatttctacctcccttggttctctcacatcaacaagaaccttaccttgttcaggatgttggaccaatttcttaacatcttgaaagttgtatggttttggacccgctgatgacattgttctaatcaaagttcttgctggcgattgtagtgaggctttctgtacacttaaagatctaaacatgcttgcactttctgttttcttcttgtactgtctcttaatgaaaatagaaggagtcaaagtgctatcgacgacgcttttaaaccaatatgactaaaccctatatacacatccacaactttctagatagggcacgcaagggtcgttgacccacccttctctctatatgtccaatctttcatagatcctgggtacagagatacttcactatatccagcctccaaggcaactttcaaggcttcagaggctcttctgcctgatgcacataaaagaaccaattccttgtcatattcaggctttctagttttgaaagtgttgaagaaagtctcagaatccatcgccaatccatttgggtaggatctgtaggaaacattgatcgacgtagggatgttggtctcttgaaattcttcaggttccctcacatcgatgagaactactcgagagttgggattttgtgataagaatttgatatgctcgtattcatatatcttatgggtcattgatcctacttttaacaccactactcctacgtttttttcaatcaagaagaccgtttatcaatctttaaaacatgtatcctaaacaatatgaacaaaacctaatcatacaagatatcaacattacaaaactcttgaatctcctacgaatctcatcgatcctgatccccctgtcagatgcatatcatctgcaacaactttaacttcaaactgcttggtatctttatgataatctatcaccgttacggaagtgttaggaatcttggaagaagtattataatgaagccagctcagtaaggatctaatagatccaccatgcgtaaagatggcaacattcttatgattattggcagcagcttgttccgctactgaaacgaaacaagttgcaaatctgcctataaactcttgaggagtctctccaaaatctctgaaggatttcttaccttgttcaacagcaaacttctcagcctgatcaatctgcataccttcaatcacccccatacaacgttctcttagctcataatagtaagttactggcaaattttggttcgaagtagctaaagcagtagctacagtctgtttacatctgatcaaatcactactagcaactgagtcaaatgtaagagaatcttcaacaagtcttttacctaacagtgtagcttgttcgaaaccagtttggtttaactctatatccttatggccctgcataatttgcctaatgttataatccgtctgaccatgtcttataacaaacagtctcacaacgtttccgtcgcatgcctctgaaaagcttgacactgtcattattaatacttatatgctcgactaaaaacctttatggtcttggcttctttactcagtattggttcaacggtaagtttaattctcgtcatcgcataaattcctacagttataccaatacggtctgtcgcatcaactgatatcaaaaaatccgtcaatttaaatcatggaatatccagatgctgatacgatacgtatactgattactactgataaccatgttggatacaacgagactgatcccattgctggtgatgattcttggaagactttccatgagataatgatgttggccaagaactacaacgttgatatggttttacaaggtggtgatctattccatgttaataaaccttccaaaaaatcgttttaccaagtgatgaaatcacttagaatgggttgcatgggggataaaccctgcgaactggagctcttaagtgatccttcacaggtattccattataacgacttcacagacgtcaactatgaggatcccaatttcaatgttgcaattcccgtgtttgccattgctggtaaccatgatgatgctaccggagaaagtttactgtgtccaatggatcttttgcaagtaagtgggttggtcaatcattttggaaaagtgttggaagcagataaaattactgtgaaacctcttctattccaaaagggaattactaaattggcactgtatggtatggcatcagtacgtgatgaaagattatttcgtactttcaaagaggggaacgtaacttttgaaataccatcaatgagagaaggtgaatggtttaatttaatgtgcgttcatcaaaatcacacaggccatacaaatactgcatttttacccgaacaattcctaccagagtttctggatctagttgtttggggtcacgaacatgagtgcatcccccatttagttcataatccatccaaacaatttgacgtcttacaacctggttcatcagtagctacttcactttgtgatgcagaagctcaactaaaaaatgtatttatcttgcaacttcgtcatgatcaatcaccagaactcataccgattcccttgactacagtaagaacttttctaatgagatcagtttctttacaagatgtcaattatttaagacctcatgataaagaaggtatatcgaaatatcttgcaagccaagtcgaagaactaattgctgaggccaatactgcaaccaaagctaaattaggtgacgctttagatgaaatggatgagcaacagttacctctgccgttgatcaggttacgtgtagattacagtggtcccgatagcgatcaaacgaccattgattatcaagtggaaaacccaagaaggtttagtaacagatttgttgggcgtgtagccaatggtaataacgtcgttcagttctacaagagaagaggaaaacataatttatcctctaaaagagggcccaattcagcggttaatgacgctgatgtagagagactcataaatgaacgtggtggtgaactggaggtcaacactttagtcaatgaccttttacataaaatgcaattgtcattactaccagaggttggtatgaatgaagctgtcaagaaatttgttgataaggacgaaaagagtgctcttaaggattttatcgacaaagagattgagaacgaagtggatatgctagtaagtagcggcggggggttacattctgataatccagaacaaataaagtctttaataagacaagtgaaaaaagctaattacgttgtcgattcatcatcatcacctaaccatgaaacacctgttactgccgtaccacctccaccactaacacatacggagacacgagaacttgatattacacctacaccagaactatcaatgccaaccaggaagaggaaagaacttcctaagaggaaagcgtcccctccaattagcgaatcaattgcaatatcggatgatgacgaagaagatggcgacgaaatagtcctctcagatgacgataatgaagataatggtatggatacacagaagcaaagaacaagcaaatcaagcaaacccaatacatcaaaacccccatcgaggaaaagcaggcagaccactacggtgggcaaatcgagctctggaagcaggtcaaaatctacaaaaactccaaaaaccgatattttaagcagtttgctagcaaggaaaagaaaataagaacccattggaaactctacagagaattatttccgtatggatcctaatgcattattccttatgttttcttttttttcaagatgatcttcatcggcctttgagaaggttgaaaaaaaagttgaagatgtcaacataactgacagactgttgaagaataaccattataccggttaaatacgcgcttttagactttactggttatcgattttaaaatgcagaatgatccattagttcaggtgcaagttgatgagagtgaagataccgaatggaacgatattttgagacagaagggtgtgattcctgagaagccaccatcaccaactgcccaactggaggaggcactcgaagaagcgttgaataaacagcatgaaaacagattagatgataaggatttatcagatttggaagagctagaagatgaagaagatgaggagttcttaaacatgtacaaacagaaaagattgaaagacattgccaaattacaggagaaatcaaaatttggtgacgtatttgagattaacaaaccggaatatcactcagaaattacagaggcaagtatgggtggtgcaaaaagtggtcacgaaaatgtggaagacgccgagggtgtatatgtatttgtgcatctgtcgctacagagcaaactgcaaagtcgaatagtgaatcatcttttcaaatctttagctgcaaaataccgtgagattaagtttgtagagatcaatgctcacagggccattgaaaattatccagaatctaattgcccgacaattctagtctattataaaggtgatgtgcttaaaaacctgataaccttattagaattaggtggtaatgatacgaacttaaacgattttgagcagttcatggttcgggttggtgctcttaatgaaaaggacagtagactaattatgaatcaagatgacgaagagactcgggaagctagaaaattaaattttgctggtaaaagcattagatctggtatccagggaaaattcaatttgggtacaggagccgcttctgatgatgaagatgaagatgacttctttgattaagtccttttatatccatttttttcgtatctatatagatagacctaatgaatgccttttgatggtttcaatttacttgatttaccacgtagaaaagtaaatatgcttgttcttgtaaaagttcttcctctgtaatggaggaaaccatagaatcattgaatttaaaccaatgaccggttgtgacttttgtaaacgcaatgtaatgtccctcattaacagttcctctatgtgcaatgattccgatcagttcgaatattatatccggaacatcatcaccatcacaataattacgcatgttcaaaaatagtgggaactctacaatatcattcaatttagcgctattaccgtttaaatggtgttcgaatcttttcagctgtaataccagaaccgccggtaatttatgaataatgagacgcttaattgcattttgagtggtattacaacggtcacaatgatagttaaaatcatgcaattgttccatcttgtggaaactgtctaagcattcgtataagtttgatttgtccttaatgtctaaggaaagatccatgaatggatctttcgttgtttttgagtccattttacattcggggcaaacaatagaactctttaaagaaccttgaaatgtcgaatgtgcaatgcaatcacataattctgcaaaattagtttcatctggagatttgttgtgactgaccatataatcattatgcaattgatttaggagaaattgccaatattcatgtgcatcttgttggaaataacccgccaagttttcattaatcttccaagatgatacgaataacccaataaaccccgcatattcatcacttgtgcggctattgttactatcatcctcgccattcttaattaattctggatggccgtaaaattcccaaaccatcctatccaacgcacaggaaatgcaactcaatggatcctgcaaagggcatcgttgactatgcaattgatttattgaaaattggaagaaatacgggttatggatcaaacattgaacaatcgaactcatgaaacatgtcgaacccatatttaaaaggccttgaaggccgtctctgcgttctaatttcggtatttgagtctttgtaacaacatcatcccaatatttgtttaacatggaggcggcaatcagttcattactacctatgtaatcaccacatttgaagcagaataacagcccattactcgagttgattccaaatacgtggcccacttttttactatgttgcccaaaatgattaccattccagcatccacagaatccacattgcaaacacataaagtttgagcctgcatttatttcgtggcaatcagaacatttcataacatgtgtgtacttctcccttttggtaaagtggctaagcataaatctagctgcattacaggttctaatgaccccatctttagatttttcgttttggaatacctgatcaatgtgttggcagcccagcatactagtggaacctgatatttacaaggattccacttatcccaaattaagatgacagttgcaatcaagcgaatctaccagagaccctcgtttagatcctttctctttatgatcttgagtatatagtagtgttgaatttttcaatatcaagaaatttagcgatgagatatctatcactagtcctactactagaagcaagaaaaactgtaaagagaagatggctaagaagatattaatgctccatgggattgcacaaactggtgaatatttttaccacaagactaaaggcctaaggacagaatttgagaaattaggctatgaattgtactatcctactgctaacaacacgatgccgcctgcagatgttcctaattgcgctagtgatgaagtagtagcgagtggtgtaaatgatgtatcgacgtggatccagattgacactgctaaagctgattacagcattttaccctcgactttggattacctacgtcagtacgtgattgaaaacggaccttttgatggtctacttggttttagtcaaggcgcaattgttggatcatatttaatgacagatttcaatgtactactaaatctgacccatgagcaacaaccgccattcaagttctttattgcgtttagtggattcaagttcgaaacggcaagatgcgcatcccaatatgtagagcatccaataaatgtcccatcactacatgtgcgaggtgaattggatacagtgacggaagctgaaaaggtgcatgctctttacgaggcatgtacgcctgagacaagaacgtttatcagtcaccctggtggtcactatgtgcccaattcaaggtgtttctcaaagaaggtaactgaatggttaaaaactatagatcctagcctcgagaaatctaaatattgacgtagacattggtgtttgtttagtttatgttatagaactattgattcccaacatttctaacaacgaactcaacagttcaactgaacaaaaacaaaggtccaagtagaataagcaagacaacaaaatgccacctctccctcgtaaaaagattttgatgcttcatggattcgtccaatctggtaagattttctcctccaagactggaggtcttcgtaaaaccctgaacaagatcgggtacgatctgttgtatccaacttctcctatggggattacgaaggaagagctaatggctcagcataacatcaagccaggtgaagacagtgacaaggaggtggcttcgcagtttaatacgacaacagatggtcaagatgtctattacggttggtggaagagaagcagttcatgtttccaggatttcgatattggtcaagatgtctgggattatctacgtggctacattttagagaatggcccatttgaaggtataatgggatttagtcaaggcggtgcattcgccggttatcttttaacgaacttccataaactgctaaatttgacatacgaacaacagccaccactaaaattttttgttactttcagtggatttagattagaggcttcccaattccaatcagattatgacaagcagcctctatctgtaccttctttgcacgttcaaggtgaacaggacactgtagtctcggaagctagaatactatcgctgtacaattcgtgccaagaggacaagagaaccttgttaagacatcctggcggtcattacgtgcccaactcgaagcagtacgtgagtcaagtatgtaattggatccaatggattgaatctcaaggcaagacatcatcacaagaagagtccaaggacgatgcacccaagaaacaggataccgcgaaaccagatctgggagatgacttgatgggaaccattgattcgatgatgggggccacaagacttaaagattaggatatagaatgtttaaataccatctcaaaaactcaaaatcgttgcctaggcgacgtacccatcgcccgaaggtgggaggtacagcaaggagtgataaagttaaagatgaacgttatctcacactctatacaacctaccatctggctacaaaagttacagctatgtcgtcaaaggctgtaaaggtagtgcagattggctgcgcaagtgtttattgccttctttctgctggtgtcatctttgggtttgctgcatttaaggctgtcctactggcggaggacgtttatggtgaatattgtcctgctgattctgcaagaccatgcactgaacaagatctcaaactaaacttcatatttacgttagctgctggtgtcactaacgttgctgctttgccagttggttgggtactggatcactatggacctcgaatcagtggtattgtagggtccctttggatcactgtaggtgctgcaatgtacatttgggctcaacagttctcacatattttggacccatatctgattggatactcaatgtttgccattggtggcccgtttgtattcatttcaagtttccaattggccaacaccttccccaagaaatcggggtttatcctttcattgatcacaggtacttttgattgttcttcggcactgtttttgttttacagacttggctaccagcactctggtaagggctggcatttgtctcaatttttcggtgtctatatgatagtaccactgttcatactactttcccaattgacggtgatgcctaatgactcctataagactcaaggaaccattgaaaagatctctgctgaacatttagatgaaaacggtagactattagaaggtgatagtatatctgcgttttgcactgatgatgaagaacgcagatctttagtgaatgaagaggcattggatcgtaatgaagagctccgtacccgtagaggacgtcggaagtcggtggtggagctccatgtggagaggaaattggaacaaaaatctggtggtatatttggtatcttacatgataaatccgttaaggagcaaataagtaatccaatgttttatttgatggtagtattcacaacaatttgtatgctgagaatcaactactatgtggccaccattagatcccaggaagaatatttattgaaggatcctgagttagcattaaaattaaattccatatttgatgtgcttttacctctgggtggtgtagtcgctatacctttgacaggtgccatcttagatcacatgaagacctttgacattctagtaacactggtcacaagctctgtggtcgtaggagttttgggactaattcctaggagctttaccctacatctgatcggtatcttaatcctagtggtttacagaccgtttgtgtacacggtaatttcggactatacttcgaaggtatttgggtttgatacttttggaaccgtttacggtctattgattagcatttctggtatgttcaacatggtacaaagtattttagacacactgactcacaagacttttaacatgaatcctacaccgcttaacagtattttggtattgatcactataatatcaggtttaactctactatgggatgttcgtcgtcaattgcgtcttagaactctacataagtcagatcaagaagataactaattaattccaattttatacgtacactctactataaagggcgacaattttctgctgggcaacatttttagggtgtctaaaaatgtataagaaagttcatttgagcgccagaatatgtttccttgtacctttcccatctaatttagctctttataccctatataatgaagattttcaagggcctcggaaacctttaggtatagattgactttagacatatacaacctgatcgataataaaggatataatatttcaaaccagagatttctgtcctgaaatatggttgaatataacctagataatattcagcacaatttgaatactgataaggagtccccaaacggttttgaacatttttcgccgtcaactttttcaattcataatgacaataactctgataatggcactcaacgggatgataagaatttatctgaggaagctgctaaaatttcaaaattcgacaatgagttcctaccgaatctcgatgatgatattccgatagaaactggcttcagtcctcgaaacaacgataaaattacttggcggaaaattgtagaatccagtaataagagacaagaaattttcacgaagttcaaagaggcatcacaacaaataaatcccatcgaatttgaatcttatcacgacttcttcgttttaaatacctttaaaaaggggaaatctgtcagtggatatgttgatatagaaaatgtcatgaagaataatgctcaacatcatagaagatctaaaagaaataatcatgatccttcagttcgtgagccaattacctcgcctggatcatcttctttatctgatgatggagattatgatgagaatgatgatggtaatagggaaattgaaaaactctccagaagtcgtgaatccccagttgatgaaatcgaagagggacctaagaaacgtagaagtagaacacaagtaccagtgacatcagatgatcatttacaaatcgatgaggcagagttatcgttaagcaccaacccccccggtggtgagagaagatctacaaggttattgaataaagctaacaataataacagttcatcaaatcccgatagcgaggatagctctgatgaacatggtgaagctctcataaaggatttatacgaatctattgttcctaaagttgaacaaccttacagaagatccgactgggttctgccgtctaggttgaggtacactccagataaacaaatgaggactaagccagagtttgaaaaggtaaacttaagtgaactgatatccgtagaaaaaattcaaagggtattgtcaaagtttgaaggtggtcttaaaggcattaggaagacaaattggaattccatgggttaagatgaactatttatctgtcttataattttactaggttttggtaatgtacaggattttcctgtttgacccccacgtcttcttggtgtaaatccaaccaagttacagctgcaaattcctttttcccttgcgtttgcagctgtagatttgactgttcagtagcaatgagagcaatggcatcgtaaccaccagctcctgggacaacaccagtaagaactcctttcaattttgagcaattatctaaaagagcagtttgtactggtggctcaatatcggctcccgattccttagtgacttgtctaaaattgttcctaatttcgttaacagcatttcttatctttacaagctcaggcgattgattaatcaaagcttcatcttgtgcatccagtgcttcgatcaatttggagtaagccgtaggggttttctgattcaacgcatccatttctgtcaatgccgccatcactttctcgttgttactattgatattttggtaaacttcaagtccctttgaagggtttgaagtataccatgccttgactttcgaaactaatttagttgtttcggatccattgtttacatctcccatgacaagtctcaaaccatcaggtaaacgaactctagtgttagagattttccaatctgtatcatctattaaagaccgtaatttgatagaataattcacatctgaatgttcaggtaatccagaaatcaattcaggtgcaaatctacggtaaacgatggatccaaaagtggctgctgcgacatcgaatccactaccaattttcccttgagcctgacaatgtgccacttgagctaaaccatggattaattgcagatctttgttgttttgtacatctagttctgatttaaatacggagaccaatactgtggtaagtacagttaccaatcctgcagaagatccaagtcctgtttttgggacctttgtaatactattcgcatggtaagaaaattccttgtaagcatttcccttacgaacactattcgattgagagtgataaccatcatcagaaaaaatctcgattaaaatcttcttaccttgttgaggcttgaagtagttaaacaagttgaaaagaaccatttcaatgaaaggattctttttcccatcagtttcaaggatgttatacccatctttggcacctaatgtataggtccaataatcattgttaaactgagagctcgaaatcttcaattcgaaatgagcattctgttctagatccgatgttttgaccacagcgtgcattctagctgataatgccacgacataggatctgtaactaggatcaagaaccagatatcctcccgctaaaagtgccttaccaggcgcactaaatgctctgactctctccaccgaattcattgtcattttaatgttctctttatctaacactgatcggagttcatgcatcgaagttctaactgtcctagctttaagcgccatgcttaagaaaaagtattgatatccgcaccctaacaccacataataatcataagaatcgatcatattataaaacaacgtataaaatacatagtcaattgaggacatcttaaaagaatcaacgtgtctttttagagcgggtattccctcttgtcttacgctcggtagaagacggtgtagtccttgaccttgttatggggcctttagtacgtttattttgagttttagaagatcctggacctttgcgcttattagattcactaatgggagatgcatgctttctcttcctccctcttttcttctttgatcctgattgagtaggttcggagcccttctcttttggcatatccttgttctcaggtgggatcttggtttcttcatcttcaatttctacaggaatttgaatggcatcttcattttcatcccgcacttgtacctctctagtcggggaattggattcgtctttctttttatgaacctcttcatgctgaaagggagcctcatcagagtaattagcatccacttcgatcggtttgactagtacagatgaagaatttttcccagattctacttctttattttcgtaaatttcaataccttcacgtttacttgcaaaatcttcactttttacagcatcattcgatcgcttgccaacgatgtctatttcctctggatttactctagcctgctggccttttacatctccttcttcattagcgggaaggtcttttacgtatttctccttcattccgtcaagatcctcttcttccacttctatgtgtttcacatcgtcccttgcatcctcatctttatcgcatttatcttttgttccctcatttccagaacttttttgaagaacgtcatcctctgtagattttaggaagctatcctcttcgcctatgtcaagctcaggatcattatcattcttcacagaaatattaatttcttctttttcagcttcattgtcatcagttgagggggaactgtccctaaatgctgaaattggcctactttcaagctcccgggccaatttctgaatggctactacttcagataaaagttctttgttattcgagttattttcaaaaagtggttctctgtcatttccagtaaattctgatccattattttcggaaggatattccaatttaaatccttcctcatccaaaaagtttctaaggtcatgttcaactgaacgtcccgcctccggttcagcttcaggttcagcttcaggttcagcttcaggttcagcttcaggttcagcttcaggttcagcttcaggttcagcttcaggttcagcttcaggttcagcttcaggttcagcttcaggttcagcttcaggttcagcttcaggttcagcttcaggttcagcttcaggttcagcttcaggttcagcttcaggttcagcttcaggttcagcttcaggttcagcttcaggttcagcctcagattgagaatcctcattgtgctcttctggagacgagcttccgacatcagtgtctgtctgggcgttagtggtatcaatagtgtttacgaaatcagcgagaacgttaccaacatccttgaccccagatatgacacggcctagtgctcgaattggggacgaaaagatttttgaagctactgatcccgaacggtgctcattggattcctcttcagcaccatctaccgaatattctgattcatgactttcactgctagaatttccagccaatgcaccaacattaaatcccctctcagtacgcatttgaaagcttgcattctcatcaaaagaacttggaccaacatccaccataacttcatctgtatcatcactgtcattctcagtaagttcaaaaatttcaacattcgcaaaagatagaggttctggttgctcaacaataggttccgtagaaataacatgaataacgtccaaagcttgtaaatcttcaatttcttccagtaaaatattatccgccctagattctgtatcgcttgcctcctcgactaggtctggtgcggtaaactcatctaaaataatatctgcgaaattcagaggttccgaattaaattcaataattggctccgatgccaccaatgcaatttcctcctgatctacgcctgatgaaacatcttccagtaccaatccttcttgatcttgaatgctttgctcactttccgcttcctctatccaatctggctcatttgggccaaaaacaagaaactcagcatcatcaaaagcatctggtgaatgaattggatcaatatccggcccctgagtaatatcgatttgttcataacgttctaaaggcgtcccttttccgggagtatcggtagtatcagtgttattaccatccgatatttctgaacctttcactgtctcatcatcatttccagtatcttcatcttcctccacatccacatccacatccacatcatcatttatgttaatatcagaagtctgagaaaagaattcttcactggagctggagttaaaatcatttgcatctaccatcacctcatcttcagactcagaatcaaaactctcccctagtgattctagagttcttctcagaagttcctttggatcttccgctttttgggtagtagagaatgtgtcttttgaaaacggagagacgtaagagccaaaaggttctatgacttgagcattgtcctcgttcgatgtagtgctgtaagctgactcgcaaaataaaatctcgtacctcgaaggaacattattcgttccttcagttttcttcgcagaaagataagtttggttatccgccttaagatcagatggctcttcaacaatcgaaggttcttctgtcgagtaatacacggtggaatcatcttctaatgacgaagtagaggcattggcgtctcccgcctgtagctttggcttgaataattgttccaaaagtgaattttttctatttccagtggtatctaatatacgtccactatgtccaacaatttctggttcttccttgataccatttactgtctcattgatatctttttgatcacctttatcatcttgaagtggaacagaaactcctggtatttctttgaaatcattagctgtctcattaatgttttgttggtcacctttgtcttcttgaagcggcacagaagcttctggtgtttcatactttgtatcattaaatgactcattaccagttgattctgaagacaccgcttgtccatctgtagtttgtagaagttgttgaaccgcctggtttgcaatcattcgataatcatagagatagtcaggaacttgaaggcttgcctctgcactaacataagcactttcttgttcaggttcttctgcttgctcgccttctccgtactgttcttgttcatcctgttcgtattctccctcgtcatttctgggttcttcctcttgttcatattctcgttcttgatcttcgagatctctttcctgatcctgttctaattccaagtcatcctgtccctttccttcaaattcatattcttgttcagattctagactttgttccacttcctgctcttctgtatcaccgtcaatcaaaactgcctcatcatttccagcgaggttgaactcatttatgcctccatcctgggtggacactggctcatctccattttcaagatttctaatgctttcatgttcactttcgaaattatcagtttcttctcgatcactggcatcatagtaactagtctcatctggagatggggtctgggtatctgcattgagtccgtctttgaacttttcttgagaactttgagtagaagaaggaaagaatctactttccagatctttggccatttcgactgatccctcctcttgctcatcatttgactcggatttcttttctgattggtcaatctcttcttcttgcccttcgatttcttcagaaccgacctgtgattcctcttcatcaagctcctgtctctcgggagcctcctcctcttcatactcatcttctttggcctcatgatcttcttctacattctcgtctgaactcattaaatcgatttcttgttcatcaccaaagagttgttcagaatcctcctcttcagacttctcaggtttttgtgtttcaccctcatcctcatcctcatctgataatatgacaatttcctcttgttcaaaaactggctgatgcttatcttctctgtcctgcatatcctgtacctcatcatataaatcactattatccccttcttcctcctcctcctcctcctcctcttcctcatcatcatattccgtcttagtatttcgtacagagtcttccagccgtctgaaggatgatgtatcaattccaatattctccttctcaaatacatcctccgagcctccatttaatgcattttcaatcaattgttcttgtatccttatcctctgtttctcttcccccaattcccttttaaatgaagtttcttcctcttctaatgaatctaatattcccctacctttccgaataagtgaatccaaccaatcgagtgcatgtccagtatcttgtgagatgtctgtccttgatgttttattaactctatacctcatatcattgtttctaccattggaaccacttctttcaataaacacacttcttggccttttgagacccctgcgaggtgctgcaagtttcaatctggaagaattcggacctccctttttgctcgtcataattatatgactcgttttaggctcttttactcttcaatatcagccttttatttggaagtacgttgatgtttgtatttcgtatgtattccacattaatccttagtagcaggcggcgagttcacgaaaactgattctttaacaaaaacacatgaagataatcattgagcagcattcgaaactcttaaaaacggttctagttgattgtaattggtgactatgagttcacagacatcttctcgagcggtcaccataagctatttcgatccctttgatgtattcgaaagtatcaaaggtgagttcctacagattttcccatttcaaaacatacattggaaatcaccaggaggtgctgtaaggactgtacgtcaattacctgttaatttagttattgagagcgaagcttctgagcttaatattgatgatgtgaatcattttgtgaggtttatcgtggtcaattgcatatctgtcgatgattaccgtgggaaagtgagaccgctgttgagacagtggttaccagtatcggataagacatctgtagatgttgattctgtagagactcccaaacctattgttttgctatatgccaattctgaagtagtcgattccaaccttttcaaatcaatttcattaatagataaatttgccaaggatttcccaggactcaagactctggtattgaggtcagtttacaaatctccaactgatagagaggacttttggaaccaaatgggcaataagattaaatcttgtctactagacattttccagaagagattaacaaactataggaaaaaactatccaatcccaaaaatgctgacgaagagctgggactaagagaaaaaatcttagagctttacttggcatttaacatgcatgaggaggctacgactcaattgaacgaaataagagataatgtggttagcaagagagagaattctctgccgaacggtgaattggagactcccttcaattttgctcaaaatgaaaatgtagacgatggctcaattgcgaaaatgttactggagaataaattgactaaatttcaatatttcaagtatttcttcgtgaaaagatttcgggttttgaatatggggaaaactaatgttcccagattgttacaactatacagattgattcgagattttttacattgtattgaatccatctttagagactctcctcaaatcctcgaatttaaatactgttttatcgatgatattttgaagtacattaacgatggggggatacctattttcttggagatgaaagctgagctttcacttttgaaaagagattgttgggtccaaggtgtcttagcaaacacagattttaaattgatagataaaagttttcccaaatcgaatgtaaaatttacgtttgataggttgaaggaaagctacaaggatgaaaatactttccacgagaattttgtcaaatctacaagtctgcttcttgccctatacaataagagcagcgataaaaaacgaagaatagtagatattttatccctggaaattggtatgttgcactaccaaagaggtgaatatgagaaagccgtctcgctctttgattcatgctatgaatattacatggaaactgggtgggatatcattggactcaaaattgttcaaatgtactatgattctttgattcactgtccacagataaaatatttaaaaagagatgatgaagatgtgtccgtatcaattgttctcagtaacgcatttctcaatattctaaggatttccaaggacgaagatgaaaagaggcaaatctggaagaaatttttcgagttgcaaaaagaaatggaatctccatctttggtttatcaaactgatggacttttctgcattgccctcagtgatctttcttacctttcagaggctaacgtctacaagatcgacgtgacaattcgaaatctagcgtttctagagccaataaccgctgactcgattaaattaattttgaaaaactctgatgatcaatttgtggaatttaaactgagcagcgtaaattttgccccatctacaaaccattacgcgttagaggctactgaaatttcgtttggggaatttcaacctgtatccatagaaataaaggtgggaaatgccacttttctagaagggtttgtcaatgagaatcatcccattttcattgaaccactatatcatccggaaaatatttcctgctccgttcaacaatccaaacgtttgaatttaggagaatatgccattgatttaatacatcagaacgttaagggcctagaatcgttcgcagtggaaattatggtggagccaaatttaggctcattcccaatcagtttttcccaagatcaagatttgtatcgtaaaagagtggttgacatcaagaacgatacaacaatacgatattttccaaaagattcaatcaattcctttcgactcaaagttaaaacctctttcacgaaaaaggataatccaagagaatttagtgaaatcaggcatttcaccatatcatgctatcttccactttcagtctccgtggaggatatttttaaaaaagatgcattcatattcaaatttttattgaattcttcaactgaagaagaaccaataatcttgtacagttctaaattgagagcacccgagaattctgagcgttatacattatttggtgatttcgaacccaatgatcttatctatttaaccgctgatccaaacgaaagtgcactgaattgttaccaagtaactacaaaggacaaatttgaccacaatgatttgtttcagttaaaagtcacttacaatactttgaaagagcaaatcaatggattggtgactgattccattatgttgcaaggtgatatggaatggtaccaagaatttgaattatggaaacatttatgggaaaataaaattctacctctatttcaatatgattataacgctttcatacaaagttgtaccattactaccatgcctggcactttaaatataactgatatttgtgattacctgttgaaactttcagtatccaaaccagttaccaagagaattatagaaacattaaaaaaaattgtacgaggcgtggaattaacagatattgatatttatgcatacgtgaagaatttgacaccaaggaccttgattgttcccgttgagctacctcaaatggactatttcttttatgtggaattttcgaaaactctagaggaacaatatcaagtggggtcacctatgttgataaaaattagagttgagaatctaagtggaaaatgggggtctcaagaagtatccgatgcctttgtgcttgaggttgcaagcagtaatgaatggttggcgcatggtaaaaagcggatgttaatacggtcagagattaatgagtttgaattatacgttattccgttaaagaaaggctatttgaattaccctcgcatagaaattagtagtgtggagactggagtgcccactagaatagacaatccaaatgcatctgaaacattacttgttttgtaaaacaaaaagtctgaaaaaaagcattattatttaaactagaattaaataacaaattacatgtacccataactctaaatggatagaattgcatttaccaaatttcgttcatcaggtttcagactcaccacgtcaggttcaagaccttttctctgtagaaattcttctgtggtaggaccgatgctggcgactctatgattactaccgtttttgatagattctataatttcttcagttccttgaggactaaagaaaactacccaactattttcccttgccattgcctggaatcttgtcaaattatcaggtaaattttcagtcttgtaagtgatgacttctttaacttgaataccattacttgataatttcttgggtattatgtcccttctaatttcacccaccaataataaaggttccgaattcttaccttgctcacgatagtctgaaattatgatatctgataaaatgctgccgttaccagcatcttcaccaccttttacatttttaaatccgatacgtattaaaaagtctttggtactaggaccaacagcatagacggtcttctcgaggaaaagttgccttgttgatgcatgcaattgaggtaaaactgattcataaaggcattcaactgttcgttgagatgttacaatgatatcttgtaaatccttcaaataagcatcgtcttctagcagtttcaataatccttgaggaatatgcgtatgtgagatcaatgggatgaagacaggctcgaaaccgttcgattgaaattcaatttcgtatttatcctgttgagcagtcttattcttgagtaaaatggctctctgcattgctcatttaatgggcctttaacacttagagatcaactttataaatcatttgttaagtaaggcataaccgaccttgtaatatatatatacatatacgtagataaacatacacacacacacatacacacacacacacacacagattttatacttcaatggtacctaatacacattctatctacacaactgtaaatgaagaatggaagcaagattactcccattcaacggtagctggaggcttggaagtgatatcataagtgactctagcgacaccatccacttcgttgacaatcctagaggcaactctcttcaagaagtcgtgctcgaatgggaaccaatcggcagtcatgaagtcactggtttcaatggctctcaaagcaatgacctgttcgtaagttctttgatcacccatgacaccaacagatttaactggtaataagcaagcgaaagcttgagcaatcttgttgtaaagaccagcttttttgatttcttcgatgtaaatgtagtcagccaatctagcgatttgcacttgactttcagttacttcaccaagaacacgaattgcaatacctggacctgggaatggatgtctccagaccaagtcatgaggaatacctaacaattcacccaagtgtctaacttcatccttaaacaattctctcaatggttcgatcaatttcaatttcatatcttctaacaaaccaccgacattgtggtgagttttgattgtttgggatggtcctttgaaagagatggactcgataacgtcagggtacaaagttccctgtagcaaaaattcgatgtctttaccatctcttggtttaattttagcggcttctctttcaaaaacatggataaaggtgttaccaataatttttctcttcttctcaggatcttcaacgcccttcaacttagtcaagaattcttcagaggcatccacaacggttaaattaataccaagaccatcaccaagagtttctttaaccatggcggcttcgttcaatctcaagacaccgttgtccaccaatagagcatggaatctatcaccaatggcttcagtcatcaatttagatgcaacggtagaatcaacaccaccagaaacagcaccgatgacttctgcagtaggacccactaggtttctgattctttgaatttcagtatcgatgaagttttccatagtccaattctgtgcagcatggcaaatatcgactgcaaaattctttaataaaatcttaccatgggtagaatgtgtaacctctgggtggaattggataccgtagatagatttagattcatgtgaaataccacagtatggagaattatcggaagttgcaataactttgaaaccagttggcaatccgtgtaatttatcaccgtgtgacatccagactcttgaatgatcaacaccttggaaaagtggacactccttatcgacaacgttcaaagttgcaggtccatattctctcttttcaccacgagcaacttgcttaccgttaatccatgctaattcttgcataccgtaacaaatacctaggatgggcacattcaatgcaaatacatcgtgatccacatgaggtgcaccgtcttcataaacagaatatggtccaccagatagaatcacaccctttggtttccatgacaattctgaaatcttctgggtacatggtaacatttcagcatagatgttaaactctctaagtcttctcgtgattaaatgagaatattgagaaccaaagtcgagcaccaaaatggtgtcgaagaccttagaaacctcttcagacattataattcgttatacttttgggatatgatggagcagggaaaacagataggaggattgtggtaccccggtattatatacgattgaataaatcagaagacccagttgttattggggaaaacccgtccagactatctatgatactgaatgtgaaataaatttaaaatttcaattgactcttcgagatgagatgagatgagataggatgcgatgagctcatgaaatttttcaccgacaggaaaagaaaagagacaaatatcacttattacgtataccagagaatatgttcctttctacgaaataatcacgtggcacaagactctttgaagtacatttcaatcgttagtattaacgtccgggaatcaattggtaccttgtactgctccgttgatagaatgctcgcttactttcatgccaccagacttctctattttaagtaatatccgagagttacccagcttggcccgatatatcatgtaatacgagtatgaaaatttcaagaaaaaatgattggagactatacaggccctatacatataggaggtttgttagactaaatgaagatgccctgactctttatctaattgtcgaggaaacaaccaaccaacaacaatcactggaaccaaatcaagggaataaatttattcactccttttcattagatagaaatagttgtactgactctccacttttttctggtttattcctccttgttttgttttgttctgttgtattctgattaatataaactgattggctcctttttctattaccccttccgattgtttgtaactgtttctattgattgagtgtatgagtgagtgatgatggagtcttccaaatatacagggtttaatcacgattcaacgggtatccccatgccaattcgtcatgaagatgaacccagtcgttgtgcggaaattgaaattcaggtatccgctgatgaataccaaccacctgttcccaaagtacaaccccaagtagaattacaaaaggttcgatccggcactaatggaaatgctaatgatgccaaattgttcaagaaatattttgttgaaaaagtaaaatcgtcatcgccaagtggtaatcgtggtgataacagcagcctcagtcgagcagggggcaccaaatccaatttatcattagcattaaaacaaagtgatatggcatcatcttcagtcaaggcaacaccgcctctcctacataagggattaacgaaccagggagatatggatatggaagccgagagtgatagtggtagcagtgattcatcttgtgatgaaaaaaatgaagaatctttcagagattatagacctggtggataccatcctgcctttaaaggagaaagatataaagatggacgttacgttctggttagaaaattaggatggggccatttctcaaccgtttggctcgcgaaagacttgcatgatgtcaatgctacgcaacacgttgcaatgaaaatagtgcgcagtgataaagtctattctgaagccgcacaagatgagattaagcttttgaaaagaattcgatctcaaaccgagaagggacatgttggctcagattacattttgaaactgctggacaatttctaccacgcggggcctaatggtgatcacattgtaatggttttcgaggtattaggtgaaaacttattagcactgatcaaaaaatatgaacacagaggtataccattggtttatgtgaagcagatctcaaagcaactacttttaggtctagattacatgcatcgtaaatgtggtgtcattcatacagatatcaaacctgaaaatgtgctgatggaaattggtgatgtggaaggaattgtggaaatggtagagttgatggataaacaaaagaaaaatataaaaagatttcaaagaaagtactctcaagatttttcgactgcagtgtcaccgatgggggttcctaattcaccatcctcatcccatttgaataaggtgaaaagagatgtttctgggagtgcgattgcatctgattattcaactaaccatcctagaattccaagcggtagaagagctcgtagacatacggttattacaagttcacaacctttaccctcaccactggcgtcggccaatttcaaagaaatgaaaaaccagttcattaacggtggcaattcctccagtagtgtatcttcccaatggggggctcattcgttgcattcaaagggtagtttccctacacagactacaggaggtggcaatgactttaatggatatagcatggggagtgcatccactacacttcatccaagtgtttccgagaacgttgatagtggcagtggacctatgaatgaaggtcaacttgctaattctctatcgtcttttgaaatctctcaaaatgaggaaaacggtccactatcatcctacgtgccatctaatagtgcaattttcccgaataattccgatagcaacacaattcagataaagattgcagatttggggaatgcatgttggtacgatgaacattatactagttcgattcaaactagggagtatcgatccccagaggtcctgttaggcgttccctggggctgtagtgcagatatctggtctgctgcttgtctcatattcgaattgataacaggcgatttactttttgaacccgatgaaggtcattcttacacgaaagatgatgatcacattgctcaaattatggaactgttgggtgaactaccaccttacctcttagcgcaaggcaggtacgcaagaacttttttcaacagtagaggtaaactgagaaatatttccaaattaaagcattggccattgaaaagcgtcttgcatgaaaaatacaatttttctgtgagtgaatctcgggacattgctgactttttaatacctatgcttgaaatggatccaaggaaaagggcagatgccggtggtttggtgaatcatccatggttgagtgatactcacgctatgcaagacgttagtgtggcagatagaaaattatactgtagtggcgccgacattcctggctggtaccaagaagttacgggtcatccaaagcattagaatttttgaaacaggaaaaattttcagccctttcaccttagggcaacctccagtcctcatcccgttttgaatttattctttttagagttttaaagcatttttcttttttttttatgttttttatcatcattattatgattatcgtttatcatcatactatagtatgatagttgtgcatagagatcactcgactacacggtcagttacttaaactagactaccaccaccataatgtctcgttattttttattcagcaaatagttttaacaatacgaccagcactaagggataagatttttcacaagctttcataaacgaaccttgctactacgcgctaccgagctattcttttacatactcgtttagtgtatacgaatgctaagttctccagcatgcatgatgcataatgttgcatgatgattatcatgcaattatcgatcgaaccattctagcatggagttcgtttgctcggagcttcagtccgttccaaacgtatataaatccaacgtttgtccatatttggacatctggcttcgtatcttagatccgtatccatagagcgccagtgaataaaagataagattagagaagtaaaaagatgatcaacactgtaaagtcttctatcaacgctaaaaacatgggagcattgtttgccggttatgttgccactgttgccggtctttcttaccgtgccagtatgtacagcattaagtctgaaagctttctaagagctaaggcttcaaagagcggctaccgctaagaataatatattataaagaattatacggattttcataggtgttttatagggttaggaaattataatcattatacaattgataatagaactgctactaatccaattatagtgccacctgtgacctgcaactcggcggcttgggctttacttttcttgatttctgaagttgtagctttcaaagtagtagtacgtaattctttcgaggacaaggatgttgtggagggtctagtggaggagttcctccgttgaaagacggaagaagtaataatgggagctttaaacgttcggttcgaggttcccgccttatgataaaattcgttgattttgttgctcttctcccacgttaaagttgcatcgacacgtttacccttgacgtctttaacttcgtaatctaattttttaggatttgagtaattgccaatgatggaacctggggtcacatcaccgacgccatgttcaatcataaatgtaatatcagccggttgatcagggatctcaaaatctttggttccgaatttcttgtagacggcttttattgcagcggcatcgcatttactgacactagaattagacagttggaattgtttcgttcgcggtaaatcgagttggctgaattgataagctaaattttcaaaatccttcttgtacgttagggatttgtcttcatcatcaatgcataccacaccataactattggcttcctctgaaaattcgtagattagtccgccagaaaatgtgtctttcaatccatcgtataaaccctgagacacctcgtcaaaagttctcggcgaattctgattacatccatattctgagaatattacgggaatcttaggatcgttgaaagtttgggccaattccctgtaaccagaattttgccagttggaacttcctgagcaccactggtaactgttaagtccgtagaaatcagatcgagattcgtctagttcttcagaaacacttgtaccatcccaggaattgcactgtagatatttgaaagtcgctaatctcagagctgtattatcagcagctgaatatccaaccgggatggttctgtcgcaatgccttgaaatgtattgcttcatatcgcgctgtagagcacgtaggaatggtggatcaatttctgcatagtccttatcgtcgttgatcacctcattaccagagaagaatccgagaacgttgggataatttttgaatgattcgataaatttaaagactctgctcaaataatcggcgttgtaagtcccttctggatctgctctatttagatgttcaccaacattaccgctattgacgtctagaataacataaatcccggcattgttcagcatcgtcatacattcatcatgatttaagtaagggttcaactgataaattcgaatcgtattaatccccaattgttggaatgcatatatgtctctagcgcattgtgaaggttctgataaagtgtcatgcacaccgtaggaattgaaacctgaggaacctccgggttggtaatctatccctttgacaaaatagatttcattatcccgagcattattctctgcagatgtggccttgataaatcgatgattttgaatctgcagaggcaatacagcccttacaggaaccgccaagactaacactaaaatttgtataagtgaaagcattggtcgagacgagactgagaatacatgcaagacgatatatcctctgaccactgctcttttatgttcaagattattttattctattttattttatttcaatattatttctcccaaatgccagcgtcacactgacacgcgaagaaacatccgtagagtattaagtcgcagctacaagggacggaaacatttcaaataaatatacacctgaagcgaaccaaaatgcagaccaccaggctgagaaacctaggctacattctggattaattgccccattgctgggacatcaggtgattttttcttcttccacccatttatacaatagacatatggaatacaaaattgcctatgcttggtaatccggaagtttcagttttttttggcgatgatgagttaagaagaaagaagagaggtggtggaaagttgttgcgactatgtgctcctttttatacctactatgaggtgaaatttttttcatattttttcatatcttcttgtacgagcagaaacggtactttaaaattggactcaagttccatcaacattgacctcctttaaagttcacttttgtctggaaaactacaagggaatcaatttattataccatacgttcttgctggcgtcatcttattcttcaatggatgaggttcgatgccctggcgagtttgattctctcaaatatttgacgtatggcagaacaattttatgcaagaagtatctccagctgctgataatggaccggaggcctttctcctctggaccgcctattaaaaaaaatctgatgcagctggtcattcattcttgctacagaaagctcttaaatgtaatctatactattcattatttacaactcatctcttatccactggttagtttgcttgaattgcgcaggcattacaacagcgtattcaacgaaaagatcaccaaaggatttaccactactacctttgggcataccaaaccctgggatttgttcaatttcaccgtggtggacaatgttaccctttggcctttgtagtttaactttctttgcatcgtcaaggaattcaatttcccttgaccagccacctgccaatgcctctctagcacttagaacttcggtacggaacaaatggtcacctcttcttctgtaacccatattattcttgtcgctttctgtaaactctacaaagatatcacctgcctccatatcagtactttgatcagcttcttggtgcctaacttcgacatgatctctaggagcccctgcaggtacttcaacttggaatgattttggctttttaacgactttgtgtcctccgcaagctttgcattggttctttatgatgtgacctctaccactacaacgtccacatggttgctggatcctttgagtcattatacccattctaattatttgaatcagaataccttggccgccacaatctggacaagtttccacttttccgtcttcagatccactaccttcacagtggtcacagatatcatttaacattagctcaaattcaacgcctgtaccactgtagtagtcctttagtgataattcttcatgtacacgtagacttggtcccttgcctctatgcataccaccaaatccaccaccaaatccaccaccgccgccaccacggttaaacatttgttcaaagatatcaaagggatcatggaatccaccaaatccgccaccaggaccaccaccaccaccagcgccgttcttgagcccatctgcaccatactggtcaaaaattccacgcttttcagggtcactcaacacttcataggcttcaccgacttctataaatctttgatgagcactttcgtcgccaggattcttgtcaggatggtacttcttggatagttgtctataggcagatttaacatctttatcagaagcatccttgtttaatccgagaattgaatagtaatcttgagctagagccagtactgtcaatagctgtgatatcagcagtaaaaacagcatcgtggacaggtagatattacgatacttttcaaactcttgattcttttgtaaaacttagttttaacgatcttctaaggcgccttgtcatattacatgcatggatgagttgtcaataaggaaaaaagtattttaataaaatatctacttggtttaacatttacatacagattattttgttataatcaggagaacaagaggatctcatttcactcatcatcttcctcttcactttcaagagctgcaaatgcgttgaaagattgaattggcttatcagctacaatatctttagcatctgctggtttggtagaagaaatgtttttgttgtttggtttgacttttatagtttcttgggcaattgttggttgtggagcactttcacgggcaggcttttcttgttcttcttcatcaccgcttcccttcttattagcttcaaaagtagaccaaccatcagaatcaatagttaccttaggtttggtgtgtttaacctttggcttgccatggtgatgtgatgatcttctgcggttgaagtgaccaaaatgaccgaattcttcttccttcaaagcttgtaagtgcttaactttttcaatcatagctctgaactcaaccgcatcgaagtttggagtcaaggcttcacttggttttagttgtaataattcctcaatagtgtatctaaccattatgatcaatctctctttaacgcttaacgcttatttgtgaattgggatttctatgcaattttacaatgctcgagtcttaagtgtatttactatggctgaattttccaaaatctttaaaacttttcggtgccgtattacccggcaaagtagaaacttttcactgatggctaatgttaaatcaaatggaaccagagtagaaagcataagggagttttatctatgccagattcatttagaattgtgttgtacctgcgcatttatatttattgtaccaattcctcttaaaatgcatcgtgactgacctatgaacattggagacagcgttgccattgggggagttaggcgcctttgagtttctcttggtatgtgcatcctttaacatctttttaaggcctttgatctcgtcattggggactcgtactgattgtatgctgagtttgtagttctggcgggtaagattgagacgggtttgagaatcattcgctttctcccatacactagaatattcgtttcgcagtcccttttacaatctttgtgtcttgtttataggagtgacaagaagaggttcaagttctgtaaccgccgaggctccctaattttatatatatataatactcggcgttcgtctaccctgtaagcggaaaaagaatcagcgcagggagaacaggaaaagagagcctcatgatacagagctagtgctgaaaaattgttctgtggtgtagttgttattgttgttattgttgctgttgctgttgttgtcgctgtactacttcttcatcttcttctagccgccgatgtatccggacatacccgggttgtccggacttgctgtccggtctaccccggtactgtccagctagctatagacaccgggtaacataaaacgtacgatgtgactcccattcgcgttacgccaaagagaggaaaaaaataaaacaacaagtgaatctgatctaacgaacttgaaaaattgacgtgttggtactcacataatcaagccaattctattcaaattagcactaagctcgtctctacgattaacctcattttaccctttacccagttcaattatattcgccacattagatttcttttaacgtatcttcatgacaattgagagtgctcccttaccatcaattggtatttccaatttacctaatcaaaggtataaaattgttagtgataatggtggttcactcaccattatggtttgtggtgaaagtggccttggtaagactacctttatcaatacacttttccaaactactctaaaacacggagaaggacatggtaatagaaaacatcatcccgtgaaaagaactgttgaaattgatatccttagagctcttttggaagagaaaaacttcacactacgtgttaacgtgatagacacaccgggattcggcgataatgttaataataatcgagcatggcaaccaattgtggattttatcgatgatcaacacgattcatacatgcgtcaagaacaacaaccttacagagatgttaaatatgacttgagagttcatgcagttctttactttattcgtccaactggccatggattaaaaccattggatattgaaactatgaagagaatttccaccagagccaatttgattccagttattgccaaaagtgatactttaagtgcagctgagctgcaaagtttcaaacttcgtattagacaggtgattgaagctcaggagattagaatctttacaccgccattgaacagagatgaaggctctgttttatcacaagatgctgctgctgtcgaacatgctagacaattgattgaatcgatgccatttgcagtaatcggatctgaagaaaaatatgacaatgggtcaggatcattagtgagtggtagaagatatccatgggggttagttgaagtggaaaacgatttacactgtgatttccgtaaattaagatcccttttgttaagaacaaatctattagatctgattttgaccactgaagaattacattatgaaacttacagacgtttaagattagaaggtcatgcagaagataatgatccagcattaccggtcagagcaccggccagaaagttgtcccataatcctaaatataaggaggaggaaaatgctctaaagaaatatttcacagatcaagttaaggccgaagaacaacgttttagacaatgggaacaaaatatcgttaatgaaagcattagactaaatggtgatttggaagaaatgcaaaataaactaaagaagttagaggaacaagttaggaagttacaattacagaagcattagaaatttacatatacatatatatatctatatgtacttattcgtgtttattagtgaataatatccaacagaagaaaaaaaaaaaaaaaaaaaaaaagaaaagaaaagaaatcgttaatatcagttagtttatctatttgaacacgtaatctctatatttatctaaaaatttgattttgcaccaccattatgattaatttattccaaagatgacaagtatctttcggcatccaaaccagccatacaaccagtacctgcagaagtaatagcttgtctgtacttagagtcttggacgtcaccagcggcaaagaaacctggaacgttggtttcagcagtaccagggatagtcttgatgtatccgctctcatcggtagtcacttgaccttggacgatagaagtagctggggtatgaccgatggcgtagaacagaccgttgacttgtagatcactttcttggttttccttgacgttcttgatacgtagggtgttcaacaacttaccatcaccctttgcttccactgctacagtgttgtatagaatctcaatcttgtcgttcttttgtacacgtctttgcatgatagtagatgcacgtagatggtccttacgaactagcaagtacaccttggaaccgtatttggttaaaaatccagcttcttcacaagcggaatcaccaccaccgataacggccaatggcttgtttctgaagataggaactgcaccatcacagacagcacaggcagaaataccctgttgccagtaagtttcttcacctggtaggttcactcttctagcggaggcaccagttgccaggatcatggcatcggtagtgttggcagggccatcttcgttaaattcagtccagaatttgaaaggcttagaagacaaatccaccttagagatagtttcggtaatgacttcagtaccaaatttgacactttgctccttcatacggtccataagttcagatcctagaagaccttgtgggaaacctgggaaattctcgatatcagtagtagtagttaactgaccaccagcagcaataccgttagccatcataccttcgtaaagagttggtttgatttcagctcttgccaaatagatggctgcagtgtgggcagctggaccggaaccgatgatcgtgactttgttgtgaaccattcttttaattattgtgtttgttgtgcttgttgtgcttgatgctctactgaagagagtgcgacctgaattaaccaacataaactctctcttttatatcttgtagttcatcgagagtgcttggtaagattttttcactttgcttccggggtgaagtccggccgacgtacagcgattactaactagcacggttgaatcgaataatcaagtcaaaatagtggtgcacctctaaacgagttcgagattagttaaaatgattagaattgaaggtttcgatgtattgaatagtaatcgtttatctggattcaatttttaatacctctgcatggaatctgagtaacataactaatggtgaactttgatgaacaaaagtcaaaaaacaaaaaagaaattccttaaaagtttaatactgaacgagattcactgcagattattgtgatgtgatgaataagattctcataaattcttgtatagatattgtcctcttttttttttttttttgttctttctacgattgcatgtacatttgttcgacgacacactgacgcagcatgtagtgaaagtccgtaaatcatcctagggtcttgttagtccgtttgtggtggctctagaaatttcaccactaggtctcttgctagtgatatcagttccccattcaagagaacgtggtttaggaagaattctaatccttgacgtctcttcgacaaccacttacggttcaaattgatttcttggtaacgccacacatcgtaccatttcacacccggtggtaactcaggtacatctatgttgggtctctgctcatcgatacaacgttttatcaactgctctcttaattgacaaaaatcactgtaacgtctgaacgtttccactcgggggtaataaacctgttgtgaagcagtatcttggggatgtagtagtaatgttatcttccaaactgcaaactttgtaccgttttccccattaactatagtgcaatcactaacctggcatctttgaagactgtaaatctgattcaaattgcgcacttgagactcgtcatccatcaaagagatgggctcaggcattaaaatgtcaaccttattcataataacgatatcttagtggtcctttgaggtttttctgctgtcccttccctcccgctacggtcttatgtttcctctcccctgtcaaagttttgttattcaatcagctcatatcaaacatctggttcatcacttagactaaaaaggcataaacatactacatacgattctaatcaaaaatagggaatggagtcttttcactccaggtgaatgggtcgttgaatctcaagttcttgtttagaccagaaatctccttaatttcatctccggttaaggtgacttcttggtcaaccaacaagttttgtctcaaacgttccttcttgcttgactttggaatgactgcaaccttttgttgagtggcccatctcaatagaacttgagaggtggaaacgttgtgcttagcagcaatcttcttaaccacatcgtgctcaaatagtggtggtgtggcctttgcaacttcagagccaatgtcaacaaaggattgaggaccaaacgaagagtatgcaacgacttggatacccttagattgaacccacttgacgtatctttcttgagtcaaatatgggtgcaattcaatttgtagagctgctggtgggatacgagcaccacggagcaaatcaagcataatagaaccggaaaagttggagacaccaatggacttgatcaaaccttcttcaacgcattcttccaatgctctgtaggtgtctaggatagggactggttcctcagatagaacacctgccttggcgtcagcttcaccggtgtacaatcctggtgggtatttctcttcgaaggaaacaggcttcaaggcaattgggaaatggatgtagaacaagtccaagtagtccaagcccatgtcactcaaagttctctttagagccaacttaacgttcttagggtggtggaaagagttccacaactttgaaacgacgaacaattcttcacgcttcaccaaaccgtctttgatagccctgcggacaccttcaccgacttctttctcattaccatagtcttgagcaccgtcgaatactctgtagccaacagagatggcatcgtagatttgctgggaacaagtttcgtttggaatcttccagcaacctagacccactaggggcatcttgttaccattgttcaaagcgaccacacttgccatttttattataatctatagttttaaactttctgtagtaaagttccttagttacgaggtatttcttggtcgagtatttctcaaagacctgaatagaccctggtttttatacattggggagaggtgttaaggaaccacaacttcgcgagtaaggggggaggtagggttcgacaaggaattgattcgaaccatgttccattcggatcgcttgaattttacccaattggttgtaagcaacaataacggcatgatattatgaagcgctggattcatcccatgctcgattctatgtataattttacataacacacagttgcgccttatagaaaactccgctcgagttaactccgctcgacatagagtcactattccagcaaaggcgctctttcgtcatcttcatggtggttggtcaatgcctctctgtagtgcaaatcatccgaatagaggacgtagtgttggtagaagtagaggacgtcgaatgccactgtacctgcactaccagcaataaaaggcgccgcattccagaggaacgccgatttgtctgaagaatcgatgaaatcacagctcgacaggatgctgaagttgtaagtcaaattgcacaatagtgttgtgccgaacagtagaggagaaataccgtctgtagatttgcgtctgtagttcttgatgagctgtgggatacgtgccccaacgtaaaaagatgcgccgacccatgatagggttgtaccgagcgggctttcaggtgacggtagtggtgcagatgggggtgcattccctggttcttggtagactagcgggagggcgtttgaaacgccaattaagaagaaagtcgataaaaatctttgccaaagaccgggagagctggaacgttgtgttggcgagtggtggtggtggtggtgatcgtcgttgttttgagttccttcttgataggaaatcttggactcatggcctgctgttgccagttggttgccatgcagtattccatagtagtagtactggccacatacgaataggtcgttaagtaagaaataaaatgccaatacgatttggaaggtaagttgattggttaatacagcaccgagtagcgaagtaatatcaccgcagacccatgccagcaggaataaaggtgataaaccggcaaccgttttatccctataggtttctataatttgggggaaaagtgatacaaatgataatgcaaatgatgccacaccattggcgctagagacccagggccagacactgtggctacaggacatgctcaggatatttggctagtggtttccctttgtaatttttttttttttttttggtctttaatttattgtaatggctgtaagagtagtagttacattcgattgtatttttacaggctcatcgcgatggatgaaaaaacgacgtatatacagaacgaaataagcaaagaaaataagtccaagttactcggttcctttggggttttctatttcttttcgtttgtcttttctttatcatatatatataaaaccattaacgttgaataatgagaaactaaaagtattcggagaataaaaccggtactactcctcgtcttctcttaaggtagagaagaggaagaatggaatgtgaaaaaataatagtaaatgcattaaggagaaatgctatgtttctcgttgtttaaaactttttgtagtaatgaagccatttacgaataaacatcgaattaatggcgtcggcatccagcaaatgatctaggggcatcggtatggcaaaatttggatcgtcaagacttgaaagtagttttaaatcgttaaatccaaagtggtaattcagtaaaacgttaagagcaaatgccagtaaaatcttgtaattgtttactacacgtttggaacggtagtattcccaactcttaccttggaaatcttcctttactattgggtacttcttaaagcattgattgttggcaaccacgataatgtcaattatccacatgaatagtttatgacttacacgttgtagtacgttccaccaggttgtagagttcaatgcggttgcattaaactcctccttaaaatcgtccgatcttagcaagtagtgtgcaacaatacctcttggattcaagatacgggaatcgtatttttctttgcaaatatcattaaaacatatcatttggaccaaattgcccatttcccaaacttgttgtaaatcggtaaatgaattactctgtaagaaatgatggaaaagtaactcatcacccggttgtaaaccttgtcttgagattgattttagttttaacatcagcaataattctggtgaaatttcgtcttgttgacctgacaacttattacgaacaccactgtctatcaattgttctatctctttttcctttgcagttgggaaatccattttattcaataaatccatcatatcttggtatggttctaaataatgagccgtcactgcacgagcgtcactttgcaaaacttcatcgtaaacgttataacgaacttcatcagtcaatgcggtttcccaaacgattttccttagactttgtaaagaggaattgcgtgtaatacctctatctagtaaaagaacgtacttctgcctattggtttcatttttaatgattcttccttccttttctttatttctatccaattgttcgatcgatgccatacttgtcgatttcgagatttgttcctcatgcattttcctttcttctggactttttggaggtaaccaacttggccttgaatgcgatgtcacttctagtttattttcactgaccaatagtaagtcttcaaatccgagatcgcttgcagttttaaattctaagggtaaaaaatctgttgatgccgtcctttcagtaagtttgctttttgataaattatgggagctattttcataaatgtttgttaaattggaacttgtctgctgcatgtactcgaaatcacttgttttactaagacctggtattggtgaagtgggcatatcataaaaatttaaaaatgataagttggcgcctggttgtggtaaaccttttggataactgtgatgatgaggatgtattttattgttaccagcaccatttgatgtcattgatttattactattttcatggaatggatcagacaaatttctggtgtgcttagaccgattgtttgttcgatgaggattagtgttattcgtattcttgttcatattatgaatattatggttatgcggatggttatgaggatgagggttgtgatggttgtgatgacctacttgtaaatcggcaacctccagaaatgaactattagaaaaggatgccattgggacgttccaaaccagtgaagcgtcaaaattatcatttttcagttgagagtttgtttcttgttcatcataaaatttctccttcttacgaattgatttgcgcaaagcactttcattctgagctttgcgcaacctatacctttgagatggtgttagaggtgttttgttcggtaagatagcagacgtactattcgaatggccatataatgatggtcccatcggtacttgaggtggttgtgccatttccatcatttctcgatgtaatgggggtggccttagtgcaacctgcgactttgccctgttaccattgctaaaaatgtattggtttctttgctgttgctgcgttgggggcagtattggtttttgaggctcttgatgatgttgttgttgatgatgatgatgttgttgttgttgttgttgtaaaaagggacgtggtggtgagttatgactgtcatcaccatctgtggaaaccattgattcgtcagcttgtgaaacttcttgatccatcgttggtacaatagtttcagcagtcctttcctttatatcctgctcattatcaattgatgaagatccactattaacatctgatgaggtggcactaaacaattccgttgtacgtgttgcgatcgaatcatttgaaatcggtctttcactcttctgaatgaaatttttctttggtggtggtgttgataatgcggaaaaatctttttcatttagatctaatccctctaaagctgtcatgttcaacaataaattatcactgggcctcctaccaagacccaacccaaccatcttattattattggtgccggtgctgctattggtcgtaccggtagtggaattattcttcagatctcttgtgagatcgggtggactaacctctcttaaagtttctaacttcgaagtcatcagatctcttacgatggtatcgtatgcgatctatgttatggtacggtatagggttgatctcttaatttaaagtcaatctaagggatattttagcaatctgtcctttgggagagacagaatgggaccgaaaatcaaaacactttggtattgttgttttatatttttgtcgtcgttgttgttgccgtcgtagctgtcgtagctctgcttgctgctgtaacgattctcctttgctagacaacgagtatgtatatctgaatagattttctccgtttgtatttctgcttctacacctcttagaagataaggagagaattatatgaggcgaatccaaaaccttttcgaagaaatggagtatgttttaagctgtcaattcgagtatttcagatcgttggaattattcggtttcggtttaactgctaatgttaactaattgattgtttatagatcttttgctttccgcatgttttactttactataaaaaagatagaaaaagaaagtattaccgaaaacggtgagccgcctttgtttgttttatggacaaaacaggacacattgacgcgtcgcgtcactggggcgatatttacgcgttatatccgctctaggtgtgtgggtggccgaaatcgatctcactttcaacatatagaaagttctccagacgacctttaacgatgaatctccgcttattttagggtacagctgtctagcttgtcgaggacaccaatcaacaatgtcctcagcaggtccgggttggacttttgccatactatggtgatcgcaccatctctttatgtattcttggatgtcccccaagataagatccttgaacatgtagagggggatcgacctaggatcaacgcctggtaaatccttcttatagtagtctctcacattcagaacccaggaattcaaatgatttacctggagctctttggaatggaggtatgccagggccccacccgacatctattgcaggatttctacgttcctgatcgtagtatttctgtaatggttagaaactagcaggggaagttggtctgagactgaagtacatttcagggctaaaacccttagcggcaagcacagacatgtgaactatatagataagaatttgtacgagtatgcgtacgaatgtgtgcactaaagcgcgagcttgtgcggcagctaagtctgcttggatcaggagtatgtctgttcttgtagtaaacctcaatctgttgtcccttttatattaaaagtgcggaaaaaaatagaaagaacggtcgataatacaggataagcaactgtataagacttagcctagccgctcaagacaaattattttaccacaaatgtcaacagtcaatatggggaaatataattctgtttaatgtgataaaatcggagcttggtagttttggtctcttaggcgattgctttagaaatttgactttaagtgcccgtattgggatgatccatgcattaactccaacttagcgcaatgacaacgtttctaattaaaggtattcggatctcctattcctatttaattcttgtcttgaccgtgtttgaaacgtacatcgacaattaggacatgtccctttttcccaaattagaaagacatgagatgtatggggagcatgaagacgattctggtagcgggcagcacaagaggaacgctaaaccttgtaggccgagtaattaaataggtaagacgacaaggcgcataatggtttcgtactctcctaagcaagtattactttctatgttttcaaagagcgttacatttttacatgtctgtaattggacgtgggttgttgatatatcacgcgtttctatgtagtgttatggtatttggatgctcctgtatttagagtcttcttccgatgtagtgtaacggctatcacatcacgctctcaccgtggagaccggggttcgactccccgtatcggaattttttttttcaagtcctttcaacctactgtgcaaacctgtagtgacggatattgtttccttttttttaaatagctgactatcctataacctaatgcattaaaatatgtaaaacgtaaaactaaaattctaaccaacctctaatatacctaattgaattttttttttttttctgtttttttttttttgtaaaacttttaatgaccgctatcttcataagtcgtatccatggatagtaactgtttcttcaatgcgtcttctaatacaggcaacccatcctcatacatcttgagtaagctttccaatttatccagcatcgatggtttacgatcaataaacgtgtatccaccggcgtctgtattcatatctaggaaaagatcaagacttagaaaatcagatggcggcggtatcaattgactagccattgaattcaacggtgtagccacagcaggtgagctaccagtagcgttattattggcgttcgtaatacttgtcgttacggggagtacaggatctgcactttgtgaatttttcctattggcaacgctttgacttctcctagttctatttccaaaatccatatgcttttcactaattggtgtcattgatactggcacattcgagacggtacttgtattaaatccgaattgattaatgttatcactgcttggtggtcctgcagattgtagatccgtagaatcaagtagtttagttgccaccatcggcgtaggtaatggcatatggagttttaaatttggattattacgtttgaaatctcgatttactctactagtctccttatctgcagttccagtgtttgcgttgttggaagatgtcgggttgccattgtttaagggctgtaaaagtacgtctttggtttcattattagtacctacaggtttcattgttggaggggggccggaccccgttggtgaacttccaggcttctttgttggcgagttcatgtagttgtttagtacttttgaaggtgaaggtgtcctcaatggaagcttcattgcagcagtaccgttgttcaccccatgcataccgctactaattgagccatccgaactattttcagcaccaccactagcccttcttggtatttcctcaggtatcttcccaggcatatctctaccaccaggaattctgccactgatactcgaaggctgcttatgtgaagagacagttgaagatctcggttttgtaagattagttgctactaccggctgtggttgagccaacgggtccattgaaacggaagaaagtgaggacggtaatgcagatggtattgcagatggtgtagtagtgctggtaggtaattcttcgggaatttcgatttcaattggggttggcgccgttgtagtcaccgcacttgtggggcccttaggtggtttattgaattttgtttgcagttgtggtagagcaggtgtactttggctatggtaagctgcaccattcattagaacagcatggggtcttccggctaaatcattcggtaaatttttgttaattcttgataattccttcggatcaccatcctcttcttcattaattacatcattatcttcaaataattccatcaactttttaggtgccttagcctcggtcttcttactactgttgtttgcagtattggaattatgagatccattgatccctgtagaatttgtatggctacttttaaacattttccccggttgagccgtggaattattattggtggggaatgcatttaaagtggaattgctaacccccatacttggatgacttttacccatagtagtaccttggtaaacgagtttccctgtattattaccagtttggtagtagtgcctttcttcatcagggtatgcaaaattgaattgatcgaaatgagatttccaatctacagcggattcttccggtatttcttccacgttaatatcatttgccattatgtagtctgaagaacttaaagaatcaaaatcccacctcatttccacttgcatggcatttggatcagatgattcctcagcatcttcatcctgagaatcagtggcatcgtcatctgcgtcgttaacgggttggtcagcttctgaaatcgaaacactactccttttactctttgtcttatccctaaatagtaagtacctcgtaataagttctttaagaactgtggtagaggctgtcctgtgatgtttgatgagtttggatttcagaagatcgtcagcagatagtctttcctttggatcctcatcaagacatagggcaatgaattctttaagcatgggggaatagtgtctaccctctaaccgtggtggtttagatttagtgatcaattgcatggctcgaagcgcttccacatcacaatatggtggattacctgtagctatctcatacgtagtgatccccagtgaccatatatcaacctttgtgtcgtaagaaacaccttccatgataacttcaggtgccatccagtacggagtacccgccatagtttgccttttcagacttgattgatttaattgagccgctacaccaaaatcacaaagctttacatgtccctcattggtgattaaaacattagcagctttaatatctctatgaataacgttatccttgtggatgtattttaaagctattagaacttctctcatgatgattccaatgtacttttcatcaattttgcccggtcgaagtagagttcttagggatccaccagcacagtattcaataataatccaaagggtggtatcttttaaataagagccatagtaatgcgtaatattgggagtttgtttcatggaagctaaaaattggacttccctctgtacatcctccacttcatcttcgtctgaatccaaatttaacactttgatggcatacacttgcttagtacgtgcatgatgtcccttatagacaacaccaaacttacctgtacctataacttctgttcttttgaaaacgctagtgacatcttggttatccggcctctgaacagccagtgagctagagccacttgcttcattactggacttcttcatcatgacaggcaaaattagaaggctaattcaatttcaatcactaagaaccataaattaaccacaacctgattctaattactaaccttcgtgtctgtatatggaaatcagtctctagaaatctcaagggcacgtaatcttcgcaatctttccttccaatccaattggtagtatggtgtaggatgagagccgtttagcagatgtcaaatactttcctatgtgatgcgatcactgatcaaagtggtgtttgccagtgatagtttcacgttcttgattcttctttgacatctcatcgaaggtccgttatacatgatttttcactatttcgtcaaaaagcttatggagcttgaaggataatatcataagatcggtttaaactggaactgaaggtccattttatcgccattcgattgcattagtcgaatttttgaagctttattttccctaatgctacgaagctggaattgccttcgaccttcctgtgtgcggttcctaagcgatttgtccagcagacacgaaatcacagaatcttcattccaaagggccattggatttcttgagaccgttgatattcgtgatattgttaggcccaattctttgcaggcaacccagcttttgaaagtaataaactccgttcaagatggacatgagatgaggaaattgagaaataggatgaagaaacagtttggacaaaattaccatctgatttacccacgattaagacaattgagcgacgattccttaagactacagatgtctcttttccgtaattcaggcaggcggcagtatgattcctttttgaaatgtttaataaacattttaaacagaaaagatttgatagatacagacaaaagacaaagactttacgatataattaccttccagcatgaaatgtatccaggaaaaaatgcgaactcagcgatgatactccctaatgaagtgcataaatggttttgggagcatgtgccgcggcaagaatcatttaatcactattattttctgattaaaaacgatgtatacctttcatggcctcgatatagttggaaatttgttaaaagaatgatgcagggctcagaactggaattgcaattagcatccttccaattgttcctctaccaaggcaatcatcaatcgatttttcacgaaaaattccataaattgtacagtttccatgcaatgcttcttattctacatcgtgtatttaaagccaacgatttaaggtttgcaaaagtttatgtggcggttcttctacgcagcatggagacaagagaacctagtgaattgtcattctttcgatttaacaattttttactttactatctatcacagacgggtgatatagaattgttctttcaagcattttcagtggagctgcaatttatcaaaaatgtttccaaaaacggtgcttctttgaagatcttacacaggccattattattcgttttgaagctgcttagacgtcagggatatcatgaagagttctttacaattttatccatcttacaaaaagtttcgttaggtcagagtcaaactttcaaacaacatgcatttacagaattgattactctacttagatccttcaatgactgtaaacttactagtcagtacgtcatgtcagggttcgatagggaatccacaggtcttctacttaatgaattaggactttggaacgctgcattccatggaaatgcagctgttttagatagtctcgaattgcaatcagagatagattctttggaaagtttactcccgtcatctatgtccttgaaggggcaaccgtctatggccgtcatgacagaattatatcggttagtattgtcgacaaatgctaaggttttgaatgtagatcaatacagggatcttttaatgactttgtacagcaattatacccgtgtgttgcaagaaaggaaatttattcacccaagacatgatacaggtatcttaaacgttttcttataccatgctcggtatgaactacgtgactgtaagctctcacttgctcttctgcaaaatttttacgccagtggattagccaggaacataagagttacttctaataaatgtccattctcaatagtggtttaccagaacaatgaaatcacacaagcggaaattaaccaattgttaattttgatgcatgatgccaagattcccgtgcatttccaattctgtacctccatggttctcaggtacttacaattgaataatcaagaagaggctcatgcttggtatcaaaggattttacacgcaggattcaaagtagagcacagactactgataaaggccattagagataacaattggcaataccctgcaggcttcgacaaggtgctagtcgaaaagctagacgatgatgatggcggtatggtacaagatgatgcttttttcttagaggaagaagatagtaatactactacgagcatacaggacaaccaagggcacaaagcatctttacaacacataattgggctgctcaagacattgtaaataggaataatgtagtatgaattaactagttttaccctctcacagggcgcgggacctccaacaagttttaagcaggcttcgagatgcgcttgatttactatggttaatttgatactttccgactactttcgaacagagggcttacagaacataaagatcagaatgctcttcctttggtcagtactgaatctcctgttggctgttgtttcatcagcagaggaattggtcgaacagacccatgttccagttttgatgtggtctcatcatttgtatgtgattcgaagtacttttaatagaacctttaaatggaattcatactaacattaataaaagaataccggcacttcacaaatatttaggtaagtttgacaactcgttagaattaccccttagtactttgtttcaagttgttagagaattcactgaagattgcgaaaccagtgcattcatattcatcaatcaacctggactaagaaaagatgatcttgtggaatatgaagaagaatttgttaatttggaaaggtatttgagaaaaagttctacagcattggcttttgaacaagtggaattgatgccagatgatacctttgagcaattgactgaatacgttcaagaaatttgtagaattgataagttactttatgtggaaggggataatcttgagagttttcaaccatatatcgatattgaaaagagaattatccgtattgaatacccacctttgcctgaagatccagaattacgaggacaggccattcttacatttgactcaaatttaaaaaagatgttagcgcaagtgccatctcctgcgcatagggtcatctatacttctttagagccaaatacagatgtcctagaatctacgggaagaattttccaacatattttccaagataaggatcgtgaaatacctattgaacgtaataaccatcatctggacattccaccacaatttaacgactataaaccaaaatttgagggtatgacaggggaatatttatcaatattcgatgcagatttcattcaagagaataaacaattgctaattgcaattaccacctcattattcgggtttttaatcttgcaattagtaccatcaaggtctccgactaccactggtactactaaggataaaaaccccgctgaagatattaagattgctgataaaaaaccactggagcctcccaagatcaatttggagacgtcagatgaaaccgatagttctaattgagtgtcaatttcttggtcctttggcagcagtttgttgaaaatttcaaggattcgggcgatgagcttgatgagatgaacctttaaaagttggcacgaaagatctttttagtgcttttaaagttgctgtgtaagctttctgtctgtgtaattatttcgtagatttgctggttgaattcgaatgaatataagtggtactctcaatgcttttcgagtagtgtataaccccaggatctgtatgcctcagctggccgtgcccacgtttaatgacctgcccattccgataaatcccaacataaaagctgtggtcttggataaggataactgttttgcctatcctcgagagaaccaggtctggcatgcttattctgataagtggttagatcttaaaaagaaatatcctggggcggcacttttagtggtcagtaatactgctgggtcgaatgatgatagggattatagagaggcacaattgctcgagaaagaccttggaacgtgtgtattgaggcatagcgtcaagaagcctggttgcggacaagaggtaatgaaacacttctatgagaataaaatagtggaaagtcctgatcaagtagccgtagtgggggacagattgtttactgatgtcatgatggctaatttaatgggatcctacagcgtatggattagagatggtgtcaagatttcatcaaatccaatagtgaagtttgagaaggctttgtattcaatgtttaagccatcgtgatcgtagaaatataaataaaaaatcaaaattagaaatatattgtcacattatgtacatgcatgataggcacttgagttaaagatctaaaaccatggtaagtaattagcatcagttttggctaagtttcttggattaacagcagaactaatacaatctaggatgaattgagtggtaaccgcaggtgaagagctgaaatgacctagttgtgcaactttccggatgattaaatcgacgttggcctgcaccatttctcttaattgagggttctccacaataggtctgtgtaaattactgaaccaggatatgatttcatcacgaatgaataatgtcaaataggtgtttagttcgctatcatgttctattagggcacgggaaatggcaaaaacgttaacggcaaatataccttctagagcagattccccaattaacttttgaatgttaggagtcaatctgaatgggacaggctcgttattatggaagatcggcgtatcaggtggtagattcaattcaaggtttttcattaatggttttacacgctcatatgggtacctggatggtaacatttccaaagtgaatacatctccggactgcttgtccacatggatcttgtgtggggtacgaccgttgatcatcatcatatatgtcataaacacaaatgcaccatagttcgaggcgaactgtttacggaaaagccagaaatcttcgaactcagtgaacaaagatatgaagtaatccatcaaaaccgtagtgggtaaaaacattgattgaattgaactaaatatttccaccttgactacggttaaatcaggtgtaggtaaagccttatcatgagcaatgttcaactgttccgtaacaaagtcctgtatggagtctggattaattcctttctgtgcacagtattcgtcatagatttggtgtaaagtcgtaaactgagggctatcgttcatgatccgtacctgtggtgatagtggaactgcaataggtacggtaaactggatgtcccgacgtcttgtctgtacattctttgataacgaagaattgaagagtctgaacagctgagacattctttcctctcttcttgaatgacgaacagatgggtactgaactgcaaaatagtgaatactaccgtcatggccccttattaccagtctcctataggaggagtgagtcccacgaacgaaatccacagagggcaagaaacgagcaattttgatgaagtgcaagttgttgtctttgttcaataaatattgaccaggaatttcaatatcttcgaatttttgatggtggaaattactcaaatgagggcacagtttctctagattctcaacctttggagctctatcaagcttgttttctaagcgtcttctccagtaacgtagtctctttatgtatgtttcaaagtctggtttgctgtctataaagtcagcattgaacttgggtctaatatgaggcgctaacaacgtctctgaaaatcttatcaaattattctcagtgttagcgggaagtttaggattgcctctggggaatggcaatctattgtagttaaatgtaccatcgattaatagtacattgatcaatctaaacaagtcttcatcagttgtggtcttgaacctctcattgatttgcgcaacaagggactcgagagatagagccagtaatgggtatgcagtcttcaaaatgttattcaattcttgcaaatgctcccatggctggcgaggtccatcattggagctattttgattatcaattctatctcccattacagccattgtttgcctttgtataaccgcaaagtcctccttagtggtacgcaattggaaatgaagtgcttgaggataacttttggcaatacgtattaggatttggcggaccatatttgcctctttatgggaaagcgaagtgagcaactgaggaatgaaagttatccaataccaaactggaacttcaccacggaaggactcaaatgcgttcgctaatgaaccagaagcatcgtccatgctgatcaaccaaagaattctgcacaataatttccttgtcttggcacatttgtagagacctgcagcttgcaagtaacaactgatggcattactagcgaaactaatgttatttggctcctcagatagacgacgatcattgaagaaaccccattgtgcccaggctttggccaaattcaaatcgatttgaaccgctgtagcaaatgcttgattggcctcatcgtgggctctcaacttggacaggaacatacctttcaaagtgaagaattctgccttttgaactgtgccaaaatacaccaggtttgtgttgctgataacatccaaacctgtggtgagctcgttcatattctgatagtgacactttgcttgttcacgtaatttcaggaatgcttcctggatttcaatattgggcaaagtgtagatgcgagctaactggctaatacaaacatcaggcatgttgtgcttccgtgcaacgtgggcaaatctattgattacccatgcaatctcatggtatcctctgtaggcatgggtattgacgttgctattactgttggcgtgttgtaaagatgggattaaaggtaagtaagcattgttaatcacctggaaagcatgctgtctccaggttactagatcattccacatattgacatcatcccaaatgtttggaagacggtccctccaagcctgtaaaactcttttcacctcctgagccttagcatccaaattctgagcagttgtagtatgaaggtttgcataaatctgtgttgcctccaaaaattcaatatattgttggaatgaatgtagtagatatttgtgagatggagaatacctttctggtagggaggcccatttgtgtaaacttaattggataccttcatcgcataaccttctaacgtcttgatcaccctttctagtatctgcaaaattttgcagtgctaagaaggtttcgaagacctgtctccttggtgtcggaacatccataacgctcttcaccgactgctctaacgcctctctatcgctgttccaatcggccactctccaaccacattctagaagtagatccgtgaagccttcgtgtttagctaattcagtcagtatgtcccagtgttgtagtttctcagcacataaaatccaattatcttcccagagggcatattcagattcagagtaaggtaaggctccactgcgtgctttgacttgtgccacctcatatagttgctgagctttatcccatagaccaatctgttcataagaaagagcggtgttggtctctgtgtatttagcttttcttctccatagaccatggaacatatcctcttcctgtaagttaacgtaaagttctagcaacgcatcttcgttggcttctacaattttagaattgtcaatggaagtattattttgaattgactccaagatcttgatgcattgataccaggaattgtatgatattgccaaatatttcactaaatgaggaggtaattccagggaatctaccctactgatggaatccagtaacgtgcttatgacgttggctttagaattggtttgtcttgagtgataaggtttggaaaggagtgcaattaaagagcgaacaaatccatatttttcatttcttggtatgcacttgtaggcttgggggaaaacactgacccatgttttgtggatagctgtaggattttggtagaagatctcgactagcgggtcaaaaatatttgcagcggtaatattgcaaaagctttctaatgatacaacatgctccttgacgaaagaagaaaggtctttgtttttagattcagaggaaacagtgacattatctggcaaaaattcccccaagattttgggtgaggacaatccataggcatctatcaatgttagaggacggtccttttctatggcaccgaataaaagctgcaaagcttggttgagccaaggatggtctgagatgaattcccaattttgatctcgtatcacataataaagcctttctttaatatctctttccaaactgttatccaaaatagtcataaaccttcgtctaatacttacatctctcacacgggttcctaccaaaaatggttgttccatcctcacagtaatttcggtattgttgaaatgtttttgatcaaacaagtctagaataatttcataaaacaactttgacagcgatggttctcctctgacctcaaaggccagcattttggttaaaatggcagctttttctttcaccgttgggaacacttcattgttaaaaacccagcccctagcaatattgacaatctttctcaagaaattctggtccatagaacggtctattagaagagccacagtagataggaatgggcgacgagaatcgcctagagatgatactttcatcgataataggcacaaaactttttcaagtagtcttgtggtgattcttgcttcctctaccccagcggcatccctaggttgaggagtgctcaaatggtctttgcacaatttgctgaaagtcttcattattggacccaacagtggatctacactgtgtggaaataccataaataacgtccagagaagcataactcccgctgcaatcgatgaagttccctgtaaatcttgtcctattgttgcaataacagtattgacgaagttttttcctggggtttcctcttcattatcgttaatcacattcttttgcttaatcgcctttaaaataacagttagaactttttgtaatacttcttggatatcatggtgatcaacttttagacatttatccaataaattctgtatcgtagtcaaattctccatgacccaatcagcagatttgtttttgaaaaaaacgtataggacatccaaggcattcatactgtaataaagaatgttttcagatcctaagtcttggtacatgaggaacttctcgaagtaaaataatttcacattcacattagaccagtgtttttctgataaaagacttgacaagattttcatggccctcaatccaagttctgtttctgatgctctgtgattactggaacaaacgtaccttattaaaaatgcaacacaggtctcacgaagattcatcgaaaccgtctgattagattctttcttcggaggtgaggtagactttccactctcatcgttttccacttctggagtttcatccattatcacatcaccatcttggtcttgctttttggattgttcaatatcttgggctctatcttcccaatacaaaattaaagaggcaagatcaatggccaaagtatggttatctgggctgctattagaaataaacgtcactttgctcatgtgatggatgatattagagatgaataactcccgagactcaaagaacagatccgggtgattaatcaagaattcatataacgtattattttgtcccgaatcattttcaaacaataccctcttaacccatattatccaagcatttggcgttccagcagatatcatacgttcatgcattacaggtgctagaacgtcaagagactgtttaaccaaatagcgagcttcggcgtgggaacatcttaaaattgcaacaaatacttgcgtgacaaccttgagtggaaattcaaattgggcaataaagtatgaagtgactaagtaagcagcttgcttgaccaatgtgtctcccaatttcaagaaatgccaattaaatttgataacatcttttctgatatctgtaatcatttccggtgcccacttaataaaaacggatgagagctgtaagagttcgaaacgatagacatcatatcgaccggcaacattactcaataaaacctcattagaacttttccaaattttttgatagatcaaatctagccactccggtctcacgttgtttacagagaagctcttcaaagacttgttccttgaaccctcatatatgaaggtagcgttcacgatattctgtaacacgaaaacacctgcatccaaattcttgtcacttagggcaaaattcaaagaactcgtcaagtaggccgcttgttgttctctgttgtccgtgctgactacattttcgaaaataaacaatttgaacctgtgagaaagttcgaagccgtgagatatggcaaattctatgaagtctagcaacaaattttgctcctccggataaaagctaatgaaatccaaatagattccttggtatctttcaatagcttgattcaattgtagcttatcaatgtaaaaagcattcttcctgatcgttctcaatactaaatcgagcatgtccttcaattttaaaaccatctctcctttgcctttcaaccattctttccctcttattttaaccagagtactaaataaatctagcatgttagtgaaaaagctgacgacacgaacctggttggttgggatattcgtaatgtaatattcataaaaggtgtccatttctttttcaaaatcatctgcaagatctcttgcttccgatttttgaatgatgctgcacatgaaaagtattagttgtcttagcgccatgttctttttgaaatactccatgaaagagacatgaaatctattcaaatacttggctagaggtgcacggaaaggtgagtccaattggattcttaactttctttccaatagcataactttgagaagaagatcatttagaaacatatctgcttgaggagggagtaagtggaaaatattaattattccaactataatcttggtgggagtctgttcacaaatatcttgaccgaacattgtgtcaagaacttccactctgcaccatgcattcaaatggtccaacaactttctaccaatttcaactttgaaataggcaattagcaacttcaaaagtttggaaagcgcttccaaaccaggaacagttaatttttggtgatcggaaaggttcattaacataggtttcaacccattttgcaaaagttctttaggtagtctagaattttccgccagtacgccttcgagtgcatgatacgtggtgtcaataatctccggagatgtcttcaacatcgtcttgaagaaaacagctaggatacgaaacctaatatttccctgttgagcagctgcaaattcttcgttctttaaagcaaaggccaataatttgatgcaagaaacccttagttgcactagctgttccgaggttcgatattccgtagccctttgtaaactagatagcgattcatcttcagcatcagccaaaacaatggcctcttggagtaagcggtaaagttcctcgttaaagttcagaaaagtatttggtaatcccagacagtatgttacagcatccacgtttccaatttgcatggcaaagggtaatgctcttaagggtttggcgaaaatcggcgacaacaggaaatgctttgagtgctccatcaagttcactatgggcacattggttgcttcagatattacagccaagcatctctgacaggcttgtctaaccttggccttcggattgctcaactcgcaaacaatatcagttatcgtgttttgagaaattttagaatttagttcattcacatcagaaagagttgttcgaagtacttgtagcaatagttcttcagcactctcagtgatatcagcgggcgtctctgagggtgtatcttttagaacaaatagcaaaccgtctatcaattcaaattgggatctcttcaagaatttagccgatatgccgatctcaattaaagtttttataccaatgacaccagccctcttatcgtaaaaagcctcctcataacaattgtgaatgaatcttctaaataaagcaaacaccagggagtgggtaaatacaagctcttctccataaatcaatttgcctctttcataaactcttttgatacctgagattgcgatatttctgatttcagtaatataactggatagtgaatacgatatagcctccacaagaaccctactatcaatcattactcctggttgtttcaaatcaatgttgaaaacactgctgtagtttctcttgtccaacagagtattgttcacctgaagtaaactaaagtggtctatcaaccagttaagtagtttggaggagtcttctttcagttcaggaaccgtgtaagaaaagaacatggcctgtaacaacttaatgaaaagcttttcctgactatgaaatgtccggttattcttgactggttctgctgtgaaatcgggctttatttctatcttttcaagtgtcacagtatgaactgctgtttccaaaagagcatcataattctcatcgaaattcgtggatgatttaacaaaaagcaaaagcacagatgacagatatttaaatgcactcactttataccctgcatccgctctgtaatctgctaaaatttccaaagcggatttaacaccgggagtaacagaaagtggtacctcttcagttaaaccattcatcttgaaaaatgcattgatttctatatcaagttcattttgggactccagatctgaagctggccttagaaaacggcgattacggccacctaatttgcctaagattcgaactgcagtatggcttattgtatgattgaaaggttgaggtttcagtagtttgaataaagcctttgagacatcttcaacaacggtttctatgatgggatcaaaatattccgccgtaagattatcaatgcacaattctaaagttcttaaaccttgagaaaccaagtctggataaccctgtaatgcataaacaagaggtttcatcaggtatgggaggaatggggccagcacactcaaacgcactggaaccgttatgcaaagctccacgtataattcacgctcatgaggtagacaagcagtaagaatcataccatttagtgattgtagtaaaacttgtaaaatcggtttgatggatctgtaaaggttctcaaatctaccaccaccgatacttctgaaaagagtccttatcaaataaaagtacaccagaggttcttctgctgtagtagagtactttagagagtctaaaatcagatcgttcaaatgcggtagtaatacaatttcgttgatggtagggaaaagattgacggacataaaagataatttgaacaaacggattagaatgttagatttattaaaatccacattacctaaatcctttaattttgatttcaaaaatctcaaaagaattcctgcgaagtttggtgatgtaatttcactggttaaaaatgattgggccacatgcaaaagggcagaatcctccagcatactttcatacatgaattccatctcactctcaatgatttcattgaaagttgaactgtccatctgcataaacataaaagcgagataatccatgagctccctgccatcctttgtagcagaaactggtaagctgggcattgtaatatcaaaatgtttcttcactggttgaggtggtttacccacattgctagacaaaaatcttaagccaatgatacactcgtggaacagatttttaaagacaagtacttcctcataggagaaaactctagagacggacacccaaagtttaggatttgcgatggtatactcagcagggggtggattgaagactttcaaatcatgaattattgtcttaaggaaagacatgagtgtacgatacagatagaacgcatcctttattggatcatttgtagagactggtatcaataagatcggagcataatttttaatatcatacatgctacaattgtcatcaactggttcctcttgatcattatcttcgttagattctccatcaatttccattttgctttcatcaacttttgtatccgtttcctttgttttaccgttaatggaagctacaggacctgctggttgcaaaatatgatccatgagttcattactatccttattgtctactaatatcgcctcttgcaaatattttgttttagcagttttagtttgttcatgttttttatgatatttcataatggtatcgtactgtctgtttaaaactttgaatctgctcacataggcatcaataattatcatgagtaactttttggctcttggtgcctcttgaggattttccttacccagttttaagatacgttccaccaggtttaatagtagtttagcactcattatctgtactgttaacgccaaggactgatccagcaggtagcgtgtgtacatctgaatagttttttctatatcatcgagttgtaactctgtcctgacattatggatgaaatcagctacagtactgtaagccaggggtcttaaagtttcatgagtcgtaaaacctgtgcctattaatactttttcatcaaaaagataatccagttttggtaagaagagcctcttataatttgtagaaagtatatgccttgttgcatggagtaattctttccttgcagatgataattctgagggacaatcttgcaataatcttattatcaaatctgggataaacccaacataattttgtaaaaaatccggtgtataacctctgataaatacgtaggccaaaaatgaagttgcctttatttgagccaaaataaattcacaatacgcctctctatttctaatgtctggtgacaccgttgtatacctttcacctcttgactcgacctcttctcttgcttttctctgttgctccacttgcatatttagaagatccattacaagcggcataaattctggtaaggaactggttgttagttgtttataagaagaataaagagtcaccattgtgattgggcattctgaaagaactttaaaagagtacattgccgccttagaatcttttggatccgaagtcttggtagcaccgccagctccactgatactactaacactaacactgctaccatcttgggtactgttattctcaccgccatcaacttcatcgtttaacatttgttcatctctcatgtcatcatctgaagaagcacccgttccgttaacattttgaaaagttttggtcacagtttctggtgtatttttatagatccttaaaatgatcttaataaattcttccacttcatcctgtaacggtgccttaaaagatttgaaaagtgtagttaaaatcttcatacataaaacaccattctcttcattttcgttcggcagtgcccccatgatgacttgtaatacttgattcacatatggttcaaaattttggttaataggtaacctattgaagactttcagaattgaatttctcaatttattttcaggtgaaccaacatcaaacgaaacattaatctcttgtaattgccctaaaagtagcggaataataacttttaaaagagcttgatactcttctggattgctcacaaactctacaatatcagataactcacttagtgcagaatgtctcgccggtaaggatatgccttcacctccgaatttagtgacgaaatgatcaatctgtgcacttaacgacattctgattgaagaaaaagtgggagagatatccacgcttatttcagaagtaccaatttttccagtggtacgagaagtggcaattccaattgaccaatattttaacactttttcgtaatttctgaaagttatggactagcattgaaggacatcgattttttgaacttgtaaaaattcatgttagtcttggtcaagagacaaatcacgagacctgttacctaaatgggaaatccggtgtcagcgacagaaattcaatagtgaaatattataatggtaataataataataataataataataataataataataaagcgaaaaaaaaaaaaaaataatagtgtatgatagctttagtatagtaactccctctactaatagcttgccgctagttaccacttgaaaatggagttttctatcagttgaatgggatgaaaagagctagtgacattgtgtgcattgtcaattttcttcacaaatccctagcgatggcgtcgtttctagcatcagattattacatttataggaatgtgtgaattgcgcgatgggcgatatgcaatagtttttcatagaatgttgattcacgctaccttcccttactttatatttaagaagtcatccaatctaggcagagtacctattttaatggaaaagtggtattttgttgagtctaacagaatgttgtttgtaagcttggagtgtaataatttcttccttaaaaaaaaaatgttattattgtatactatttatatttagtccatatcttatcacttttgattctccgccgaatctatctaacccttgcacaagtataaggtcaaacaaaacattctacactgcaaagaaaaacaaaactacagtgatattcttgttgatcaatgatttacttccttatgcattatttattctctacatataacaaaaaaaaacaagaaaacatataaaaataatgctccacgggaggttcgaactctcgaccttcagattatgagactgacgctcttccgactgagctagtgaagcactgaaattatggatgaaggaaaaaactgtcatcaatatcaggatgggactaagcagcaaaactaacttcttgctacttccctaataataccgcatagtaatttcgggttgctggctggaaacgttctacccgcttgttggctgttttctgacgtacttcttggcagatttgcgatagcgcctctctgtcgcgtaaatttcgataatggtgaaaaaaaatatgcaattaatagtaaaagtgtcttataggggcaataaataatgacgtgaatcaataaaaaagttaaataaaaaacttcgtcaatcttatttacatctgcctctgcaaagcaatcttaccggatacttcaaaagcagattaaagatttaagccaccggtattatcattgtttgtggtctgattaagataagcatcgtcattagcattagcatctgcattaacttccgagctattagtacaagccactactatatcaaggctaagcctggtgaagtttgctaattcatcaagaaccatactaaatcccattagtacatatttaagaataagaagaggcggaagggtttgacgagaaaggaagaaaaaaaaggagaacgactaaccactacgatgattcgaaatggctttggaccttcaatgattaagatatggttatttttgctgatatggctgccgtgtatcattgcgaaaggtggccatgccggtggcggccatgctggtggtggtcatgctggtggtggccatgttggcggtggtcacggttcagaatctggttctgacggtaagaaaggttctggtgattctgagtctacaaccgaagtttctagttcagactctgaatctgaatctagtccgaattcgaattcacattctggttcgaagcctggttcaaattcgaattcgcatcctgattcgaaacctggtggaaaagccggttcgaaacctgctgcgagttcccgtgtgaatgaggagggaccttcagcatctcaacataagaaaaccgctattggccatcatactagcgcttacgcagtatgcaacggaaatagcaaaagtagtagctcccatcaacgacgcagcacggtacagcaagtactacctacaatttccttgaatagggataacaattccctttactataccaacgtttcgattggtacaccaggtcaaaagcaacctttagttattgatattgttgaaccttataactgggtaactcataatcattttgagagccatgatcctatttcgagtaattcttcaggttcttatcaatccaatttatcacgaacttcacagcaggtggatggatctcatgttttccatcttgattttgttgatcttgatgatattaacgctaccgctatgatggataaaattagtttcgaatcactatcattgaaaaaccaaagctctcacacaattaataatacacaaaatgatggttctggggcactttacaactcgcattctttgactctttcgaactcatcattttttgaaattaacgacacaacttcatctaaaggtgtattaggacttggtggaaaaattaacgataagggtactgatattgatagttctcaatttgatagcagctttttccttttggaaagtctaagagacaatggtattatagaatcgttgtcatattcactttggcttggtggcgataccaggccttactatgatgtgggacgtaatgttcctgatgaaatcaattgtggtaaattaattcttggtggcgtggacccatactactattctggacctttgaaaaaattcaataacttaatttttttagattccaggactgatatgctgtcccgcggttatccagttttaccgatgagaaccatcaatgtcgtttcagccactggtaatagcattaatgtgaccaatgagaatttcttaacacctgtgttattggattcaagatattcgtttagccatttaccagctgaaacgatcgttcagattgctgtgcaagtcaatgcaatttacatgaaagaagtcgatatgttcgttgtatcatgtaaaattgctgatatgggagttaacattcaatttgaatttggtgacgtttccatcgatgtgccatttaaagattttctgatgtcaacgcataatcctgaaacgaattctacaatgaaattttccggtggtgatgaagcttgctttatgacgatggttagtagcgaagagactggattcaacattttaggtacatcttttctcagaaatgtctatttagcggttgatcatgatgaccaatccattgcaattgctcaggccagacgcaagtacactacccttattaccccagatggtgctggtacttcagcaacagcaagtatttctcactatttgagcccctccctaagctcaaccggaaaggcaacaccaattgcatcgggttacattccatatgctgtctctagcaatgaaaccctatctatgacactatctccatcccaacccccagaaactcgtataccagatcaatttaccgcaactgtcttttcgaatggactaatttctacaggtaggtctttctacaacacttacagatcaacatcatcttcaagtacagtgcccactgattttgccagcttcacagtaacctcagcacagcgtacaagttctacgggacagcaaggcaataaaggtagcaatgcttacagactaaaaccaccagagattgccaacaaatactggatctcccatatctttttgctggcaggtagcattatgctggtaatgatatggtaagatggacaatacaaaactaaagatacaagaatatgaataatagaataaaatctcccctccgcggctaatttatgcactcttttgatctttttgaattttggaatccctttaattcttttataataatttttttctacttcatatattctcaatttactttaccttcgtttgtatacataataaacaaatcgcgtcaaagaactttttccctcttaccgggaaatttttttcacggtacatgatactagaaaacagttcaagagtttaacacgtatatcttgggtaacaaacaaataaaaactagcaattagcatttttgagagctactagcattttataccattggtaccattggaaggaaagtttaagttagggtacaactagcaatcgtatcaaacaacaatggaaccggatgcattagctaaagatgtttccagcctttcactagatcaaactggttcgagaaatacaggtaaaaaaggtagaagacctaatagagcatatcataatttaggatcaggtgcaggtacccctaatactacaccatttctgaatgcaagtgcaagtcaagagagtttccaatttggagcacaacctccgcaggccccatttgctggtgccagtgccggtgccggtagtgtaggtaatgggttcgacactcagagctcaccagtacctatgactgtcccaggcttcccacctggcagtcctgccataatggcacaagagagggaaagagttgcaactgcagtagattcacctgcatcaccctggttccccaagggcaacacaccagtacagagtagttcacattttgtaactacgcagagatgggaagatcaattgctacatttgccaaagacttttgaaaccgctagggattcagtaccaccattaccaacgactgcgttctatgccatagatcaaggagcatgtgacccaaggttattgagtttatcaatgtataacattccagtggatgagcatttaagatcagcaactaaattaccattaggtttaactattcaaccgtttgcaaccacaattcctgatgaacccctgccactaatagatcaaagaactgaaacaggtcccctacgttgtaaaagatgtcgcgcttacatcaacccaggctttaaatttggattcgatgctactgctacttgtaacatctgtggtgttaaattgcgtctaccatccgatgaatttatttctccaggtattagtttacaaggtcctgatatttcattcaaacctgaactacaaaagggtagtgttgaattcttagtcccacagatttacaatgcagttcaagatcaaccggcattacctctgcactatgtgtttctgatggacttatcacttttctccaatgaaaatcgcagctccttagctgtcgtagaaggtattagaaccagtattgaacatatcgcaggctctcaaccaaattgtaaagttgctattatggcatatgacaataagattagatttttcaatttaagaccagattctgaatctgcacaggaatatgtggtttctgatattgacgatgtgttcttacccttttgcaacggtttattcgttagacctcaagaatcaatgagattaattgatatgactttgaataaaatcgttgaatacattacggtggataaattcagccacgtcgcaccagtatgttacggatctgcattagaagccgctaaattggcaattgatacggttactggaggtcaaggtggtaaaattatttgtaccttgaattcattaccaactgttggtaacggcaatttggccttgaaaaaagatgatgcggctcgtaagaaattaaactgtgacaacgatttttacaaaaaaattggaaatcaattcctgagatcttacatttctctagatcttttcgtcacaagccctggattcgtagatatggcaaccataggataccctgtagaggcaacttctggtaacttaaaatggtattccaattttaaccacgaaaacgatgcattcacattgattaacgatatgtcaaacgctgttaccagtatcgttggttatcaagcattgataaaagttcgttgttcaactggtttaaatgtaagtcaatattattgcgaatcgtcagaatattctgatcgcgatccaatgataccagttctgacaaagaatacaactctagacgttcttttgaagtacgatcaaaaattacctgttggtaaaaacattgcattccaaatggcactgctgtacacagatattaatggtgttcgtaaagtacgttccattaatacgaatggtgccgtttctgataacattagagaagttttcaaattcttgaatcaaaacgttgcacaacgtattatgattaaagacgtggttcaacatttaggtgattgcgatttcccagcaattagaaagacaattgatgataaaatggttgaaattctaacacaatacaaggcattagtcggtggtagtttgacatcacagttagttctgcccgaggcactaaagactttaccatcctacatgttagcatttgagaaaagtgaattaatgttacccaataaccacagtacaagaggaaatgctagaatttatgatcttttcagatacaaaacgttgagcagcgctcaattacattataaactttatccacaaatcgttcccctacacgttttattaagtgaagatgatctatccttttatgatgctaatgaaaaaatgttacaagtacgtccagaatcagtcgaaagtctttctgtacgtaatggccatcaacatttgactaacggtggttgttatttaatatttcaaggtgatacggtttacgtgtggataaatgaaaatacaaaccgtatgcttttacaagatctgttacaagccgacgaggaagttccagtaagtcaaatctcattatttggtggctcattacctgaagtaggtactgaagtcaaccaaaaggcgcttgatctaataaagaattggtctcaattagttagccagccttacctacctgtcgttttactaagaccaaacgtggatccttactatgcgcaagtgatgaatcaattgttatgtgaagatcgtgctgttaaccgcatagaatctctagataactatttgatcgctatgcatcgtagaattcaagaaaaattgaagaaggatgactacatcaaagtacaaaccaaccataacgcagaacaagacggtagtctactacagaaatttgttcaattctaattctcatcatttacttatactacgagtgcactgattttttgatatatatatatatatattagccgagtccccttgtcagaccgtaaagggtgatcattttcttcaactttcttggaggctgaaaagaaacctaaactatcacttctgacgaacggcggcaatttcaattctagattttttttttctgcgtcttcttgactagcaagaacaacgaggtactttacaacaagcacataaacaagggtcttgcacaaacgagaacctcgaaggaaggaaagaaataaaagagtgagagaaagcgagacgaaagagattactcctgagtgaaaagatagttaagacctagcgcattataaattctcgaaaggtgtttttctgagttttatttgttttattaatattgttgaccgaagcgtttataccaaaaagaaaatgatcagtagaccggaaaaccaaagatacccttcttcgaggcgtttttcaagtactaatccatttcgtatgtcaatgattgattctggcgccgtgtcgccaacgtccgagccattacaagatattatgagatctccttcgccttctatcgatgagtctcacgaaatgcagtacgttcatgctccatatcacagtgcaggatcctcaagagttaattcaccactagatggcgacttcaggtatgtgtttttattgtattcttttgttttattattgcggggaggcagttaagaggaagagagaagagttcaaacgtaaaaagtgacacgtaaattgtgatttattctcgaaagaacgcgaaacgcgaaaaatgattatgttcgagaacttacattgagattacgcccggaatttgttgtggttggttcttttgttcgccctcttaatgacagtgctttacggaatctaaaatagacaaggcccagggagagaaaggagtggttggcgatgagataacagtgacaacaacaaagataaaaataaaaataagattttgggcctgtattctttaaggtgcggccttacatggtttcctgctccctttcctctcgaagttgtgttaggtcaaaacacgaattcacagcagtatcagcagcaccagctggaagctggggctcatagttttatttgaactccgtttcgggatgaatctgcaacgattttagtacaacttgcgacattcttactataaaacgtggaggggatcaacgaaacaacgttatagggtttgctatctttttgttattatatcttattttgataaaagggataaggcatataacgaggctgactctgatgtgttttttttattttattttactgtgtgatgcttttccgttcccttcttttcggaagccttacacttctctccccaccttccccactacaattttattaattcgatcgaaataatatactaacatttgaaaatgttaagcagaaaaagtacatcaccatccacaaatccatttcttgacgatgtggaaaacgagaatttgaatagaggtagtagaagtagttctcaaaatggctatactccgccacgatacccaaaaacaagtccaacgaccgcagcatatccctcagcagaggaagaaaaacagatgctaagagacagatatagggaaactgaagatatggataatagtggttatggtgacgcagatgcagacgcggatgcagacttaccgccatcatacgacgaagtggcaggccctacgaaatcaaatgctccttaccgaagggagaaggcaagtgtctcctcaaatgcagcacatacaccgtcatcgccaaaagatccactaatcaatagcaatagagaatcagatccccgtcgtcgttattctcattatcgtggaccagtcccatctagagcgggtggcagtgggggtaacaatgagcgtagcgtaccaacagccccaatggtagcagcaccagaacctcgtcgtcgttatgatagagatcatacaccggtacagccaagagatcgttataaggagcgtgattacagtgaccgagaacaccgagaacaccgagaacacagagatagagagagatctcatcaccacccacatcgtcatcgcagccatcgtcatcgtgatcatgcaccttcatcgtcaaaagacaaaaaatcttcaaatggaaccaagccacaaccgaaaaatgtcgataaaatcgataaaatggatgtcactgcactttttggtagctctttccaccatgatggtcccttcgatgcggtaacacctcataggaataaaaatgcaaaggcgccaccggttcttgcattcccagctgatgggcctaacaacagtattggtggtgctccaaccaagaaaaacgctatgaatgaagtctttggcaggatggatcctgaggatgatgacgacatttatcaagcacgtccaaagagtagtccaagaacaacggtctttggtgtatctagtgatccgtcatctgctaacggcagtagtacaactttggatgctgtcaaacctggtgctaaagatctaacagcttttgatcctcgtgggagggtccaagccgttgaagggccaacaacggatgggttaggatctactacatttttagatggcgctcctgcatctaataaggcgatcggagaagacgttagggctcatgcacgccaaactagattaggtggtgttcagcgtaaaccatctttatcacaaaagctaactagtacggttagaggtggtagtagtagtggtcctagtagtagttacggtaacggtagcggtagtggtactgtttattcaaggaatctagccccagagaagccgctatctttgactagatctcatagtggacatttagaaaatggtgatgacgatgaagatgtttatttgggattgccctcatctgagctctctagaaagaaatcaacaggtaccagattaatgagacgtgtgaggagtatgaaagtcggtagaaaataataatgcttttttccatcccattctttttattgttttaatttctttatcacttttatcatcatcattatcattaccattattatttcctctcgatcctcgttttgtagattataatacccttctttttatgaatttttcgttccatgagcgcgtaacaggttaagttgagttaaattcttttcaaaattaagctttatttacagaatataaaatgaaaacacgatctcttctattcatagcaattgatgagattgacttttctctggtaacctcgattccacaaggtcccattcaatggattcccagactctatccagatacatttgtttaccatatggaccataatcgtacaaccaagcctttggtgacgcatcaattgccaacagtggtaaatattcagtatctttaaatgactccatctgtctggcttcctcaacggatttacttcttagtggtgcattgaactcctgttgctcctgatccaattccttactcgccttttcatattgattctttaattcatccatatgtccctttttgttaaaattaaatggagaccctgcattgtaagtgttcaaaatgaacaaacgatcaaattccaatttctgtgaatcaaagtcctgagaagcaactctacgggctacaagccacgtaaatccatcaccactaattgcattattagaatttaggagtaaagtacggaattccacaatggatccgaatgatgatacgagcgctgagtgtaatttttcttttccggtatctaggggttcatttgcatattttaaagttaactctggtgtctttaaaagttctttgacgtcgatatcggatgcattgggtaattccttaggacaaccgtgtaaagtggaaaatgcaaacttcaaattgtacaacaatgtcgcataattcacaatattacgtttaacgccagattttgcgttttcatatatcaatttttccaatggtatttcttcgatcccatttgtcaatgagtttaatttattggtataatgttcagctctagagaaccatccgttatccagaccttgaggtgaaaaaagtccttttagaccagatccggagtttagatgttctaatgtaggcgtaatgtaactacgactagtacgcaggaatgataaactggatctaaacatccttcgacaccgctattccctttgacattttatcagcactcatgctcatctcactgacctaaatcaatctcatttttttttcatcccagaagtagtcatcatctacgaaaataggaataattgccacacgtgaaaagcatgtgacatggaatgacggagattgctcaatcccatctgcccataatgtaaagtagacaaggcaatcaagggagcttgagtcgttatcagtacctatccctcatataccagataccaattacttccaaggggcccctgcatgtagaaagaaggagttcaaaaaagaaacggccaaaatgtcagggcttcattcgaaaaactatataaacacattttgctcattattgtctcataccattcttgtggagaagagtatactagttttaaatttttcaaaatgattgttgaaattagagattacgtctgcgaaatgtgcaagggttcctgtcgctgcactggtgacaagtgttgtcagaactgcacggagtgtgaatcctgcaaatgtaagacccacgctaaggttcactgcgaaagttgcggtgccaaatgtgcatgcacttctgacaagaattgtggatgtttagactgattgattgtttgatgagtaatgaatatcatatttagtttctatgtagctttgtattaacgcaggaatatgcttttttttactttcattgtctaagtaactatcactccgaacgaaagaaggaccctctcccctaaatgagttaccctacgtaaagccttcataatttttcaattttttttcttttcttgcttacctctgaacggtttgttttccttttggacagaacgagatgatgttgaaagagatgaggtggatgagaagcaattagcgagaggcttccaggaaacttttacgaatctttcttttgaagaaatcgtaaaaggagaaagatcgtttattcggcttctatcaatctcaacaagaattaaatctttttctctttccaatagacgtcggttagcattgatacattatagttcttttttttttttttttttttcccaacctttcatttcattttgcccttcatcttaaaaagatattagtataaagaggctttaaaattctgatctgaattgtctaaggtgaatcaagactgtatcgaaatatgttaaaatggattcaaggtggtatatccgccgtaactggtattgctgaaccggaatacggttctgattatattcattccgtagcggatagagtcaaaggaaaacagccttataaagaaacgagtagagaagacctttactggctaaacccagattataccaacgttgaaactgctacattttactttaccaacataaaaacaggtgtgttaggttttgctcaaatcatccattcaaacattattggtcttcatacccaggcccaatttacatttagagtctataatgcgaaggaaggtaaagaagctttaaatctgtggacctcaacaaaattagaaaattttagaattgacggaccaaatttctatgccgataatctatcggttgaattggatcaagatagcaagacgtatcattttaagagtgatgttaacgaaaagtcaaaagtagatttaacttttacaaaactaacgcctggttgtaaagttggtgatgatccctccacctattacggtgataatattgaagaaccttggggtcgaatgagacatgtcttttggcctaggaataaagtcacaggtaagattgatataaaagtgccagtaaagcaacaagcatcagaggagcataaagacattaagggtgaacaaacgtcgcaagatacaaggcaaaaagatcgagagtcggctgaagaaaagggaacaagcgaagagaatgaagaagaagaagaagaagaagaacttgaagatcttcatatcaaattcacagatgaaagtcctgcattatccatgttcgtaatggcattccaaggaatgaaaccacatcatgctgccaaggcatggaatttcctctacttccattctgaagaccacactgcagttctgatggagtttatcacacccaaatcatacgctaacacaaaggtttcggtagggattatcaccagcaagaacgaagtcttaagcgttagtgttaacaatgattttcgccatttgaacagcagcgtagactctgtaggatggaatgttcctaaaaacctttctgttaaattcaatgggttcaagagtacagccccagatgaaaaaattgctgctattaccaattcaccaactaaacaagaaaaatatgataacgatacccaattacatgctactgtagaaggtaagctagaccagttggttgaaagaatcgatgttatgaatgaaattccaaattttgtcaaatcaatcgtatctggtgtagcaggtacaaaaccatacatttaccaatatgcagatgagtttacgctgcaatttcaagatgcatcaaaggaaaaaggtttggcttgggtcgaggtaactttcatctccgaaggtgagacagttaccgacgaatcctataatgaagcctaagcttatttcctacaatttttcttccctcctccttatcatccaaataaatcttaataatataatattacatagatatttttttttctaatagttttttattcgctaatgaatggagttgtgcttggctggacaattaagaaagagtctcctgaggaaaattccaacataaaatttcacatcaagaaagtaacaaacaagaaacaatccggaatcaaaaggaaaattgttctcactatatgggaaatcccggaatttcctgttaccaagggtaatattaatatggtaaataaataaaattcttttaggctatcgccacctacggtaaattaataccactacattccacatccctaactccgaggcatgtaatattcgtgtgatatgcaaatccatgtgaaactccattattgcttcctaatctctccgcatctgacctttctccggtccccccgcttctattttggcgcaatgagcaccgcgtgacggcttctccctgatatgtcgttccccccggatgtttttccgggtgcggcgtctcttacgatcgtcattttttctcttgcatttcttgcatattttccatacgttccatatgtttcaattgttccatattttccttttttttcctttttttcctgtctccccacgtcgtagttgctttcccctgacataaaaattattttaatccggtcggccggaaaatttgtacggccttgtctgtgcatggggcttgcttctgtacattttcaaaccgtggggtcattttttcttttagtggggctaaaaccggaagatcgtcatcgcgattttttccatctatttccagtgcatcgccgaatttagatctacagcgctagttcagcaatagcagtaccgttgaaggaaaccatccagaggatggaagagagaaacattgcaaaaaaaaagaagtataaataaagatgagataatcgttattcttcaggttggtttcttggatctcactttatcttgtactaactcatcagacaattacaacaacaattacaacaacaacaacaacaaaatttgaactaatatcaatgtctaaatcagaagaacataacgaaacggcaataactcctgaattttcgcctgagttatccccaactgaatctccatctccatcaggtggtcttccagccaagttagaagatgaagcattgaaagactatgttctccaccccgaggatgaagaacctattatcgacctccccaagaagccagcttctgcctacatttcagtggcgatcatgtgtgttatgattgcatttggtgggtttgtttttggctgggataccggtacgatttccggctttgttaaccaaagcgattggattagaaggttcggtacacagagaagtgatggtacttattatttgtccaaagttcgtatgggtctagtggtctcaatctttaacgttggttgtgccattggtggtttgactctttcaaagatcggtgacatttacggtagaaaaattggccttatttccgtggtcgtggtttatgtggtcggaattgttatccaaattgcttctgtcgacaaatggtatcaatatttcattggtagaatcatttcaggtcttggtgttggtggtaccgctgtgctttcacctatgttaatctctgaagtttctccaaaacacattagaggttcattggtttcttgttaccaattgatgattacagctgttatctttttaggctactgtactaattacggtaccaagaactacactaattctgtccaatggcgtgtacctttaggtctttgctttgcctgggcgcttttcatgatcggcggtatgacctttgttcctgaatccccacgttttttgatttcagttggtaaaatcgaagaagccaagagatcattatccaagtcaaataaaatttccactgaagatccaggtcttttggcagaattggaaaacatccaagcaagtgtcgaagaagaaaaacttgcaggttctgcatcatggagtgaaatgttttctccaaagaccaaagttttacaaagaatgattatgggtatcgcattacaatccttacaacaattaactggtgacaactactttttctactacggtactacgattttcaagtctgttggattagaggattcattccaaacttcgatcattattggtgtggttaactttttctgcacattcctttctcttttcacagttgacagatttggtcgtcgtaagtgtttattgtggggtgccattggtatggtttgctgctttgcagtcttcgcttccgttggtgtcactagattatggccaaatggtcaaggtaatggttcttccaagggtgccggtaactgtatgatttgcttcacaatgttttacatcttctgctttgcaactacttgggccccactatgttacgtcatcgtttctgaaagttacccattgagagttaaatccaaaggtatggctttggctacagcggcaaattggctatgggggttccttatcagtttcttcacacctttcatcacggatgctattaatttctactacggttacgttttcatgggatgtttggtatttgcctacttctacgtcttcttctttgttcctgagactaaaggtttaaccttagaagaagtcaatgaaatgtggatggataacgttttgccatggaaatctcctgattgggttccatcatctaggagaaatgtagactacgatgcaaacgcaatgtctcacgatgacaaaccattctacaagaaactattgggataaacttcctacgactgattttttttgaatttttattttccttttgttatttgaacgaattaatgtgtgacgaaatattacttagtgtctgatttttttgatacagtatagtaattatctaaactcttctatacttttaattaatatgatcttttgttaatagtaataataatagtaataatcataataatattaataatagttctttgccgccatggcaagatcaacacccacgtgagattcacgtggacattcttctcgaaaatttttttttcagctagaaaaagtttgaaaagttttccaggttatctgcatctcatcgcataatattattatatatggattcatgtggaaaaggataacaagttccctttttcaacgatttactcttccattatatcatcgaaagtttccaattaaaaagttatccattaaaagggaactctcaacgttacaaccaataaaaatgagtaacacttttgcgcaacatttacaaaaattgtccatcaacgatccacctgtctttgaaggttctcacccagaggccaatgtcgttgatttgatgagaaactacgtcgctgaagaactttctaaagtttctggtgttgatgccaagcaaatttatccagcattagagtggacaaatactttggaaagaggtgatcttctaattccagtgccaagactagtcagacaaaaaggtatcaacccaagagaaatcgcacaagaatgggctgaaaaattcccacaaggtgaattaatcagcaacgtcgaagcaaatggaccatttgtgcagtttttcttcaacccacaatttttattccataccgttgtccctgacattttaaccagaaccgaagactatggtgcttgtaaatatgtggaaaacaaaaaagtgcttattgaattttcatctcccaatattgcgaagccatttcatgctggccatttgagatctaccattattggtggatttttgtccaatttgtacgaaaagtgtggttgggaagtcattagaatgaactatcttggtgactggggtaagcaatttggtatccttgccgttggttatgaaagatacggtgatgagaaaaaattagccgaagacccaattgaccacttgttccaagtttacgtccgtgtcaataaggatattgaacaagaaagtgattcattaccagaatccgaatccactgatggtcaatcccgtgcatatttcaagagaatggaagatggtgacccagctgctataaaactatggcagaaattccgtgaattatccattgaaaaatatatcggcacttatgctcgtctaaacatccattatgatgtctactctggtgaatctcaagtttcaaaagaatctatggagaaagcattaaaactttatgacgaaaagggattggttcacattgatagaggtgctaagttgatagatatgactagattcaacaagaaattgggtaaagttattgtccaaaaatctgatggtactactctatatttgactagagatatcggtgctgctattgatcgttacaacaagtaccacttcgataaaatgatctatgttatcgcatctcaacaagatctccacaccgctcaattcttcgagcttctcaaacagatgggatttgaatgggccaagaatttgcatcatgtcaattttggtatggttcaaggtatgtctaccagaaagggtaccgttgttttcttgaacaacatcttggaagaaaccaaggataacatgcatgaagttatgaagaagaacgaagttaaatatgctcaagtggaaaatccagacgaagtggcagatttggtcggtatctctgcagtcatgattcaagacatgcaaggtaaacgtattaacaactacgaattcaaatgggaaagaatgctttcatttgaaggtgacactggtccatatttgcaatacgctcactctagattaagatcaatggagagaaatgttccagatatcactgtcgctgacatgaaaaatgctgatttcaaacttctgcaagaacctgctgccattgcattggttagattgttgtctcaataccctgacgttttgagaaatgctcttaagactcatgagccaactactgtggttacctatttgttcaagttgactcaccaagtttcttcttgttatgatgtcttgtgggttgctggtcaaactaaggagttggctacagttcgtctagcactttatgctgctactagacaggtcttgttcaacggtatgaaattgttgggtttgactccagtcgaaagaatgtaattgccaattgcccatacgtatactgtagtattctttgaatatcatagaataaataatttaaaattagagattttgaatgatacaacggcccaataccgtatgtgtcgtataccgctaaaactacaaatgttttggttctataaataaagagttagaagacaaataggtaacttaacacgcgtcccagtggccgagtggttaaggcgatgccctgctattaactaaaatagcaattaggcattgggctatgccttcgcaggttcgaatcctgtctgtgacgctaatttttttgaatttcattactattctctcaattgccaacgacgtatctaatgatacaaatttttcaatagctcatctcaatgcaactcatctcatcgtatcttatatcatcctcagaactctgattatatatattcaactattactataacccttctaggactaggtaactacatccataaaaccagtgatcatgggtaaagctaagaagactagaaagtttggactcgttaaacgtactctcaatgccaagaaggatccaagactgaagcagaaccaggataagaaaccacaaaaagcagatcctgaattgacaagaaacattccacaagtttccagtgcactgttttttcaatacaatcaagcaattagaccaccttatcaagttctgatagatacaaattttatcaatttttccattcagaaaaaaatagacatcgtgaagggtatgatggactgtcttttggctaaatgtaatcctttgattacagattgtgttatggcagaattagaaaagttgggacccaaataccgtattgcgctcaagctggcgagagatccaagaatcaaaagattgagctgtacgcataaaggtacttatgcggatgactgtctcgttaacagagtcatgcagcacaaatgttacatcgttgctaccaatgatgctcctctaaagcaaagagtaagaaagattcccgggatcccactaatgagcgttggtggtcattcttatgtgattgaaaagcttcctgatgcattctaaaaagagacaaatagaaaaatttatttggtaatgtatttatgtaaattagtataatattgaggatcttttaaggctacaagtttttttattttatttatttattattatgtaacgacaacgtactgacgcttgtttttgttagcgccgcaccattaaagtgacattttcttagaaaatgaaatgacaactacaattaacaacaactaccagtcaaaaatacaaaggttcctactttagcagcaggtatggatcccagttctgtattagatcaaactatacaagatgtttctaatcttcaagcagaatttacccacattttgggagaaatacgagcttcagacacacaattactagatcagaggaagaaatatatgcagaaggattctcaaatacacaaattcattaggcagcatggatcattacaagaacatccaaaagaacaagagctttctgagaaaattagagaaaagatgtcagcttgcaaaaatctacaagagcaaaaatgcaccatggccaacactgcgttgtacctagtagccaaacacctatccagattggaaaagaatataggtttactggaggaagatggccttttagcacctgtggatgaagatgcagatagtagcacagagttttcaagggaaagctcatctgtaagtggaacaggtgaaagaagaaggaaagctgcatcttctagttcgcatgaaccttcgcatgtgaaaagaagaagaacgggtagagcatcatcacctaaccaaaccgctcatactccatcagtaccaccaccagctacatcactatcacaacccgtagcttccagagaggacgaatctcatgagaacactgaaggtagcccattaccagtagttgaaaaagacgtcaattttgacctacaggattacaacgacgatctattctctggatacaacaataacgaggaagaggatagaactctctactgtttctgccaaagcgtttcttatggtgaaatggtcgcttgtgatggtcctaattgtaaatacgaatggtttcactatagctgcgtgaatctgaaggaacctccaaagggccaatggttctgtccagattgtagacaggaaatggcgaaggacaaactgaaaaagaagaagatatgatgaatgacgactttttacgattgtgttctggggtaagaggattatatgaatttataaaaatcgatgtttttgcatataaaaattctagggcatctaatgaatgtattcttggcatttgaaaatagctttttcccacacagttacgagctattcttttctatgtagcggcacatactattaaaaagcccttcttagtttctcgcactttaatatgatcatcattagtacaaaaaaagggcacacagaaaactcaaaaccagagaagagcttcaatcgaaggtcctccagaatctctggtcaaactgctgagagctacacacactacctgcataccatatctaagcttttctactttcttaccaagcacagatttgcatttagatttgaagctttacaagttaacagaagtacaacgaaaaaaaaaaaaagacacacctttataacgatcgatcatggttactgcattaatttccaaggccctatcagaagttcatccaaccctccgaaccaatggtatgggtattggtaatactcacaggagaatttcacttgggttcttaccggttaacaagaagaatccattggttcgcaaatatagaaggagaaatggtagagcagatcagagaagttatcagtccctgggagaagactttggtagtagtgctcgagaacctgatttctttttaaacgaggcgatcgaagaggaagactatttgaacgatactgatggcggtgaactaagtagaacaatttcactaccgtcaagagtttcagagactcctgatgtttcacaattagataatgattggattttacaagaacacgaaagaagatactcctcagcatacaactctgatcatgaagaacaagaagaattggacattatggggagatatccaggcagagaattggactacgatgaatttatgcaaaggttgcaagttcagaaacaaatgtacgaaaatgaacgtgcaaactttggtatgaagcctaggaggccgtcattcatatctgtcaccagtagaggcacagtaccgatagtctacgaggaatacgatgaaaatgctccaactgaacgttttacaaatgttactttccaatctgaatccaaggttattgcatcctattccttcccactaatttttactttcttattagaacaaatgttcccaatggtttgttcattgacagtaggtcatttgggtagtaacgagctagcggctgtttctttggcatctatgacatccaatattactttagctatttttgaaggtatagctaccagtttagatactctttgcccacaggcttatggatcgggaagattttacagcgtgggtattcatttacaaaggtgtattgcattttcgcatgtggtattcattccgtttgccattttttggttttactctgagcctatcctctccttagtggttcctgagaaagaattagttgccctaacggctaaatttttaaaagttctcatcttaggagcaccgccatacattttctttgaaaacttgaagaggtttctacaggctcaaggtatatttgatgctggaatttacattctcagtatatgtgcacctttgaacgtcttggtgagttatactttggtgtggaatcgttacattggcgtcgggttcatcggtgccgccatagctgtggtgataaatttttggatgatgtttattatgctacttctgtacacaatgtttatccagggtaaaaaatgttggggaggattcactagaaaggcatttacacattggggggatttggctcgtttagccatttccggtattatcatgttagaggcagaagaattgtcttatgaacttttaacacttttcagtgcatattttggaaccaagtacttagctgcccaatctgctgtctctactacagcggcattgttatacatggtaccatttgcagtgggtatctctacatctactagaattgctaatttcattggtgccaaaaatcaggttgcagctgatattgcatctcgagtggggctaacattttcatttgccgcgggactctccaactgttgtttcttggtattcggacgtcatatcgttgctagaattttctccagagatgaaactgttttaaatttgatgagttcgttgctaccactagtggggattgttcaaaatttcgattcattgaatgcagtggccggtgcatgcctaagaggtcaaggtatgcaagctctcggtagtattgtaaaccttgtggtttactacataattgcaatcccattaggaatgtttctaagttacttcttagactggaaactctatggtctctgggtgggtatcggtattggaatgctactcatcgggctaatagaatcatattatgtactgttcccggactgggacagtattatgacgtacgccgagatgcttaaagagacagaagaggatgacgaatctgatgatgatagtgattacagggattctgacgaagaaccagatgagacttcaccattattaagactttagttagggagtacatcccatgatcatgtgatagttgtggcggaatcatttttccgtatgttgatgataaatttgacaaaaaggatgagatgagcaaaggataaggatcaacttaaattgagggattgaagagctactcaagattagtttttgttgtcacaaatttgaactcagtagttttgatactgcaacgacccaatatgcgttcgctaatgggtttaatcaaaccaaacctagtgctcctaagggccaagagatttaatagtagcgggagtactaatcctgctatgatgttcccatgtttggataaaatggagcgagtttctgaggagttgaggactacaaccgttggtacacagggacaaaatgaaccggtttacggtaaagttaaatctggatttgaaatcttcaaatctaatagacccttttacactgattatggtggtgttttgcctaattttcaaattgcatatgaaacttgggggacattgaatgaagataaatctaatgcaatcttaatacatacaggacttagtgcatcttctcatgcacactctacaaatttaaatcaacagccagggtggtgggaaaaatttattggacctggtaatgtttgtctggatacaaacaaatggtttttgatctgtactaacgttcttggtggatgttatggatcaactgggccttcttcacctgatcctgctgatggattaccatacgctacccgtttccccatgctaagtgttcatgatatggtacgtgcccaaaagagactgattaatgaacattttggcattgaaaaactgtatgcctcgttaggtagctctatggggggtatgcaatcattgtcatatgcacaacaattcccaagtgaagtcaataaagtgataagcgtgagtgcttgtgcgagatctcatccctctagtatagcaatgagacatgctcaaaggcaagttttaatgggagatcctaattggaataggggattttactatccaaccgctgccgaaccgaataagattccacctcatgtagggatgaaattggctcgtgagattgccactgtcacttatagatcgggacctgaatgggaatccagatttggtaccgaacgactagatgatgaaagatcaccagttctgtgtcctgatttcttaatcgaaacttatctggaccaccaaggtgagaaattctcattggaatatgatgccaattcatttttatacatttccaagacgatggatctttttgatttgtcattatctcataaagagagaagtattcgtaggagggccagagctaaggaattgtacgagagtggtacattgaatgaagcacaagatccattacttgatagaacttcagataagaagagacatagaactagtactgtcgaacaatcctatcaagatttgaaacaaggttgtaagccactgctcgacaacgatgtacttgtagttggtgttaaatctgatgggttaatgccatgttggcaacaaagggaaatttattcgttgttggatggcgatactaaccctaacgtagcacatgttgaattacaagaatccgaatcgtactttggtcatgatacttttctacttgatttagaacatattggtcgtagtattggccaatttttatgtaaataagtaatgcattagacagagaaagatatttacagggatttgaactcttttcttatatcgaagggccagctactcttctctgcttcctcaactctctacgtttttgatccgcaaccttctttgagtccttaattaaaatcttatcaccaaacattttgaaatcttgcatgtaacgtctatccatattgaattcttgcatgacaactgaatctgtcaatcctaatttttccagcgtccaaaagtatctctctggattatctctcttcaagtacctcaaaatactttgtctctgttgtacaagcattcttaagattctaatattggcataatccttttgatggtctttgatgtgtttgactagattgtgtatacggatcgtcatgcaagaagcttgtacttcactagatccggtatcaccagggaacctttggaactcttctcttgccaatttcaatgccattttcagtgagtttttactatcggcgtttctcatacttagaattcttgatatagcttctcttcttgcctctagagattccaaactttcaggttccactagttctgaatttagactcgataattccaaagttcttctcttggtagattccaatgcactcatcaatttttccacttcattttgttggtacccatgagagagtacaccaggttctctcagttctgctactactctgttgataaagggggtatcacgacgacccaacacaggatcaacggcatctacagaacttgataattctgattgacgtgccagattagcctgctttttcctctgagattttaaaaatttaacggctttaacaccttgagttggtcgactacaactaaacgaccttgaaatcgacataatgggcctaaaactctgcctcaagtcgtgtaccacaaaaccgcatgctgcaaacatgatagcaccactcctactcctcgaatatggctttaatcgatcagtataatcgattttacgtattcattcattagtttttcagatttcttcaatttttcaaattcatgttgaaaaatttcaccacgttaatgacgatttttcaccaatatttgaaaaattttcaaagaagcgatgacattggctttaactatgaagtttaagaagtactgaattgaaagtttaataggtttagagtcatatttagagctctacaccggtctcaattgaatctaagatatgagttttaggggtaacctaagaggaggccgtggaggtatgcgtggaggccgtggtaacggacgtcctaacggtcgttttgttccacaaggtcctcctgacactgtgctagaaatgggacaatttatgcatccttgtgaaggtgatattgtttgcaagtcgatcaataccaaaattccctactttaatgcgcccatgtatttggagaacaagactcaagtcggtaaagtcgatgaaattttgggtccattaaacgaagtgtacttcaccattaaatgtactgaaggtgtgcacgcaaccagtttcaaagatggtgataaattttacattggttctgataaacttttacccatcgaaagatttttaccaaagcctaaggttgcaggaccaccaaagccaaggaagaagaaagctccaatgagaggtggtccttcattcggccgtggtggctcttcattcggccgtggtggctcttcattcggccgtggtggtccctcaggcggtcgcggtggattcggagctagaggctcttctcgtggtggttttagaggtggtggtcgcggtgctagccgtggcggttttggcagaggtcgtggtggtaaaagattttagataagtgtacaatattataaaataattataagatattattttctttgacgagaaggtttagtgccaatctgcagtccacagctttgaaatatcaagcgtcgtagtagatccacgccgtatctcttggggcaagttttcgatattaatgaattggtaaaaatgatacctggtagtcctggtaattcatggagattcatgttttgaaatcccttcaaatctttaactttgtccatcttggtaaacacaatctcaaatggtttgcctattgagcttaagaattcaactatttgtaaatccatgtcattgaacccttgctcaccagaaatgagtaaaaagcatcttgccagttgctgtctttgactaacgtattccatggttaagttgccttgttccgcactactgttatacccatagccaggggtatcaacgattctaaatttattaccaatgttaaatgaattcaaagttttagtaaatcctgctcttttggaagcccttgcatactcacctaatgaagtttgctttaaatcggttgttaaactattcaatagtgtggatttacctgcattggatttccccaggaacgcaacttctggtaacccattgacaagctcaaatggtacataagtcttaccttggaattttttgccattagattcgttagaaaccttttccttaagcctctcaccaggaacatcgatgaaatgggcggcactccactcatatcttacatctgaagaattgaagaaatggtttactgaattaatttctgtagcactaggctctgaaaataaactactgtatttttgatttagggtataccaagccggtggatttgaatctctggcaggtttctttgtcttagcgacctgacgttgctttcttcccccatcactcttgaacggttgttgcacttttgtatttaaaacaatctttcctatgtcagcagctctgttagttaaactgcttgtagttgaaaaccatcttttggtccataggctcatcattcaacggccttccgctttgataattatcatctttatatttatacaagttaacctatattgaagagatgtaagaagtccggtacaatttgatgaaatattcgttgaagagaaagtgacaaaataaagaatacctacaaagaaggacaaatctctgaatttttaatcgagaaaaatgaatagaagacttcaatgcttcgaaagtgatataatattaacctttttattctagtttaattcaaattaagtttgttctttttttcctttttttttttttttagctctgcttattcatgatgaaccaaacaagttaccaaatgctgcatcttcagtatttggatcatcaaggatatctccagcatctttattctttttgacaagtctttcatttgctctttgtagaatagctgcccttctttcttgacgcttatgttcgggagaattttcactatcctcgtcgtcattattaccatttgccgtcttgatccagtcaatgaattcgatcatcaacgccctttggtttctgtaatgatctacacttctcaattgatcataaagagcatcgatatcataaccatgggatatttcgtataagtaagctctagcaggtttgtattccttgcagagagtgaggaaaagtacagtaaaaacgttcaaggcttcatagaatgaatccttgaatgaactctgacatagaacattcaaaagcaagttcttcatcacttccaccgtaaagaattcatccacactatcctctcttacaagcacatcgttcaaacaacatttcatcaccaggatggcattaaatgaacatttactatccctaaaggacattagatggttcaaaagttttaaaaacggtgctagtacgttcaaattaccaaagatggtacttctcatgtttaactgatgagatgtaaatttcggtttagaggtttgaggattggtgcttgcttgtcctacgcaatcgaccattatacgaaccacaactgtagtcaattgtctcaatagattttcttctaaaatgtcttcagtcatctcttcgtcatccattgggatgggattcacatcgatatcattcatataaagtgaccatttttgacataaaagtaggtctaaagtttcgaacaacttaggtaagaatgctgacataaacttgggaatacattcctcggggcaatttttcaaaagtggacgaatggccacattcattatatgtttccaaccgtgtgtagaaactcccggactgatctcattggtatctggtttgaaaattgcaatagagtctatcaataagtgtggtgcctcatcgatgtcaaagaaaacgcttcccaaggatgatatagcatttatcaccaataaagtgtattccctagtgtatcttactatgtgacctactgaatcagcaaaatctctcaaagtttgcatggccctcatgtgttcatcgatgaattcatccttagatttgttagatgcacctgcttcccaaaacctttcaattgtagaatattttacgaatgattgaaccacgataggtagttgtgaccaattggctggatcatggtaggcttgtaactggtataagagtctcataatataaggaagaataggaacaattcgaggacgccaaatgtcttgcaacattttaaattcatcatctttctttacactttgcattgaatagtgaataaacatcctggtagcacgtacggggaacaatgcctgccatctcttggtaagatcgaattttaaccttttaccttcatcatcgattggaatagataacaaatcactcgtttcattaatgttatgtctttggaaatattctgcgatttgtacaatacctaatctctccatgaaccagggcaattccgaaagacccacaaccgtggtttgatctgaccaagccattagctcagaatctactatcgcagaaaatctttcctgtttcctatccaatgaagattttaagacgatggtcaaaaggaatgatttaaatgatatcctttcatgatacgataggttgggtagaatcttcgctacgacgttctccaaatctgggaagattgccatcaatgattcgggcatcaacagtgccattcgatttagttcaataccgcatgcgtatcttaagtccctaacggcatccgcctctgcactacgttcctccaaatcaatttcaggatattccatcgtagcactagttataatcttttccaatagtgtgaaaagcacattgtcttttaacatcgttaggaataatgcaaaattttgaatttgcttcttgagcaaaagaggttctctaatgttaagggcaattaactggttagataaaatttctaattttgttagaataccatccaatttttccgaataatctgaaccacttggataccagattttccatcgtatacaaccattaatgaaacactcaataatcatgaattgtgataaagcgctcaaatatggctcacccttacggtccaagaatgtagaatttaatacttcttgaccgtacggtgaactgaaaaaactgtttaatctgttattgagccaatcgtaggtgtaatccaatttcacacatgatattaatcgaatgatatctcttattctttttctataggtggagcagaaattttggaattcagaattggattggaaatcgatatcaacaaaatttttggaaacatgaccttctatttgttcgtaataaatcagtgcatctgcagcaaattgcaaaagatcgctcataacatatctgtccaacaatggcaagaaatcgtcatttcttaaacaggaacaccataggtctagtgttagtccacttactattaaacttggatggaaagttgccttgagtaccaatcttagatatttttcaatttgttgattgttgtccttaattttgaaaacgcaaacgtagagacaactaatcatatcgacacatttcttaacaattgggtattttacttcatcgattccctcctttggatcgaattgtaaatagtcatatactctttctaaaagatccatactattgaaaactttgtcaataacggcctgataatgttcatcattactgtaaggtcgagtaagtaagatatgcatagagtctaaagccatcgattgggcctctgggatattggacaaaaagcattgtaaagatgtgctaaaaatatcattttcaatgatcacttcactcaatggccaattcaaacaagttttcaatgtctccaaaagtctgaccacataactagagttgttttgtatcaatgcttcatttaattcagagacccaaagtgcaaaccaaccttctctatttgctttgaaaagggtccatttttcggtaaatttgtatttagtggcaaatacgtccatcggacagacgatcataacgcagagtggctgtattactgtcattcttttcaaaacagttaaatctaccaataggaaaacatcttcaaaaagaatcttgaagattagtagagtcagttctctagatgcttcactaatattccataattcggttagattactatccatatcagcccaagagtttaagagttcctgttcacttggtgattcctcctttaatgcttcaccccaagttctctttgtgatctccacccagagaaatgccagcttttgtttgatgtatctcggatcagtgtttaaaactctgtagtttaattccattatccatttcctaagtgctaatcttttatcttcgtcgtaatcattccattttttctttatggcatctgccaatagacctaacccaaaatgttttaaaataaaatctgtgggattgtttaatgcaatttggtacccccagtacggcgattcttctttagatttaacgtcatccagaaatttctgggcttctaagcgctgttgattgttagatttgggatcataaattacacccaatgcagtgaccacttgggaagcaccgtcagaatccattatgcgatattcagtctaagaatttggaaataatgcaaatagtgataaagtataacgataaaaataatacccacttcgattcaaatctcttggtaaattaaatatcacttaaagagaggacggttggaattggaattggtattggtattgatatcggtatggtataacaataataaagatggtaataataacaataactcaatctcaatggaaacaacgatctgtatgatcgaagaaacaatatgagtataattataacaaaatgaaatgaaataaaatgaagtaaaaataaaagataaaaaaatagaattagtgaaaaaaaaaaaagaacgatcagaagatcaatggattgtgagcttcaccacacactttcaacgtattggtaaaaaccttacaatgcgttaatcgtaactcttcttgacttcaaaagctcttgcattgtataaactgtactgattttctacatcttaggcgcattgggctttcgccacctaccgtcattccccttatcgtacttagtgactataagacgtatataaggccagaaaagaccatcggcggctaatttgataagattaatataaatacaagtaccaataagcaactgaaatatatcccaatataatatacatatttgtcttcttgtctataggtaaaacttcttcttttccttgtccatttcgggtctgtattcccattcagtttcttccttgataccgcgttgtaatctgcgtagtttcaaagtaaactgaggacctaattcttgcaatccaactttcttctcgttttcaaacacataacggtgccttctaaagaagatgtaatctctttgattgtgtaaagtaattacttgacgaccttcgaaatctggattcttggggaaaatcgattgaaataatgtaccaacagtcttaccgagtctggtactgaaattgtttaggatcaattccgggatgtgagatgttggtctaccatgtcccacaatttttttcacgtccacatatgagctaaccttaaaataaaatgacggtccttcaggcagatgcatgaatgttaatcctgttactttcttcttatcctcattgataataatgatatccgtgaaattacgtttgctgctggcttccacaatatctttcatggtgagaccgaattttctcttaacaaaggttacattagggaaaatttcaatcaaaacattggcaaattcgtaagcgttcctttttgcatttatactggtggttagaagaatcttaggaggttcaccgttgttgttgaaaagttgcatcaaatcttcttcatcagcctcatctttctggccaatcgtctcgtcataaactctcataccttcaatggtcttgggaacattttcagccaatcttttttcctttgcagtgggatcttccctctcttctttagctctctgggctctcatcttgtgacgttctttgttcttttgatccttcagatcagcaataatttgctgcctgagcatcttgttcttaatttttaattcttcagcagccattattgatgtcagagaaagatcctttgcagctattcgactgtctattccaactatttaatgttgtttaaagactatctcatctcatctcatcgcatctcatcgttttttttcaatttttttcaccatcatgtgaccgacgacacaaaatggactgtccatatatttgcatattattgtaagaatatttagaattttttaatagtgaagatagttgtatcatggtccattattattctgattagtatcattaccaggaatcttcccaattttctgtagattttagactatccagatatcaaaactctaacgattttcccccggtttatcagttttctgcaggaattaattcgaagtaataataacgagagctaattcattgaatatctatttcttcctctaggagccctcaccttttacataatgaattccaatatacaaggccctcaaagaagttacacggacggatctaggttcgataacgaatcacctgtactaccaattcttgatttcaatacatcgaaaattaatacaccaattcagcttttgcccataaatgtagtattaccagaattaaaatattggcaagagcaattcagtaatacgagtgaagaagacatctggaaaagaaggaatttaaggttccaacaacggcatcagcttaaaccattaattcgaccaaatagacgccaagacagaactccacacttgaagagggattccaaattgagtactgagaccaagatgtcaaatttcggcgaatatattaaggatatgaaatcacacggtcatacacagatattaatgagaactcgtgtgataactgaactaggaattacaagggctaaattgcaatcacccactttgatcatgaataattggggtggaactatgaacagcattcaggtacaaacaagggcgctaagtttgggccaggagactttcagaacggaacatgcactaagctgtcaacgaacgacaagggatcaggtaattgaactacattttggtcccgtgagtcagagcccagccgactaccagtttgcagtgtattccacagcggtacgccaacctcacggcggctaccgctggttccactatgtaaaaggagctacctacgtgaatttggctatattcctcctcggatcagactttaactattctatcaacgacaacctagtagaacctaccataggcaatgatctcaaagtaatttctgccaaaaaaaggtgcatcagccggctaaggtctcacgcaaagagctccatgatagctaatccatgccccggcaataacgataccggcggcagcatcatggagatccagcacgtacatcccaaactatacaaactactccaccatcacaccttcctgcaattgtagatgcaaatcgtcatcaaacattaaattatgttacgatataaaaattatagataaccaccaaaaagggatgttgttaaatgcattcagttgaaactcttcttcacttgacctacagaagcgttaggcttaccttccttcagtattaagtcaatgatttcttcaatcttcttgcgaccaaactcattctgcacttgagccttggaagcttcacctaagttaccttcagcaccggaaccctggtcattagagaagaccttgaagacctcgacgacttgtgatagcttaccgatacttggttccttcaggtattcattgacgtcctctatagatgtggcgaacacaattaaatcagtttccttacccttgtaaaaatatttgactgcggatgacatgatgaatatgctcttaatatgctaatacgttaatgctaattgttgtctagactagttgtcttaaagttctctgctgctgtgagaagacaattggtgtaaagggtacatgtccaacaattgcttagcttatatacattacaatagtcatagcaatgggctaaccccttcttctcagaagacctttcacgaagcgcaccgaactttaacgaactcccccccttcttggaagtgataattgctaccgggacaacaacaacgattgtcgcgtagtaaggagggctatactccgccccgagaggttcgtgtagctcgattcagtatagctcggtttattacgtatgtacaagcattacatagttggttgatcactaattccctccttgtagcgtctcctgtaaggcaccttccacctatttgctgcgtaagccaacaaattggatctgtactggcattcatgtcattaactatagtagtagccattggctatgaatcttatcatgtattcttcgacgtggtttgttccctcgtattcgtcgaattcatcttgagcgtcgtcatcaacctttgacgtgatgggcttttgaccctctgtaccatctgggttgacgttctctgcaaaatcattatcgtcagcgtccacctctttcatggccaagtgggcagcctttacgtcgtcttcgtcctcagcttgtgccagcagcttctcgagacgtcgagggtccttgctggcttgtgaggattcttgtaataggggcttatcgttcacgcccatcacattggggacttctggacccagtagctctttgacagaaaatttcgtaaagtaatccgttgtaaaatcaccctcttgaatgacaacgttgtcgagctgtcgtttctggttggccttcttcagaatgttgctttcaatggtgtggtcacttacaaacctgtagatgtgaacatctctcgtttgaccaattctatgacaacgatcttggcattgtttatccatcgcaggattccaatcggaatcgtagaatataacggtatccgcacctgtgaggttgattcccaatccacctgaacgactcgaaaggatgaaagccgtaatgcgaggatctgtattgaaacgctctgtaagcacttgacgatcttcaatcttagtagcaccgtcaagtctcatgtacaagtagccatggtagttgaggaattgctctaacacatctagcactttggtcatctgtgtaaagatcagcgctctgtggccatggtctttcaagttttgcagtaaaatggctagtttttgcaatttaccacagtcatactgcaatagcgatttgtccggaaaggctatagctaatttggtctgcagatggtgtagcggattggtcattgattggaattgacttaacaattgagcttgtgagtatgaatcaacggaatttgtttcattgagccccagtgacagttcccttagatcgagggccaccacattaggcgttaagacagcgtagttttcgattaaatttttatgctttgtgatacgggtttgtagtggagttaacatttcttctaaacactgggcttgaggtccagcctccttagtgggacccactcttaacaagttgattagattttgtccatagagcggtttcttttcacatttggacctgttaacatactgtaagaattgaagtgagtctatggccctttggcccttttgctgacccaactgcctgaagaattcctcagcatggcgcaaattggatggtaattgttcgtcctctgatgatttcaatgagttttgttctctgaggagatccacttgcctttgaaactcttgtatgcattgcaatttactaatgctttgagctctatgagtagtcattttagcgtcattattagtgaatgataaattcataaaatcaaaatccacctttctatctcgttcattctggcccagtaatctcaggacgtatttgttcaaatctgagtagtcgtatgctacacagtgatccatgctaaatgaggtggagataggtctcacttcgaaaaggtcaggatgattacagactttcctcaactgcatcaagcagttaacaattgacatgaaattaccacttgctaaggttgccttagtttgtgctctggacatgaaatcatcataaagaaatctttgtcgcttagagagacgacagtagacaacgtgctcgtactttgctggcatctgcttctctacatcacatttcaatcttctcaaaaggtaaggacgtaatacctggtgtaatttggcgactgtcttcttggtttctgcgtcttgtgcgggatcttgtccggtttctatcagtttgtccactggcctaccaaaccactgttgaaatgcatctaaatcggcaaatcctgagaagccggctccatctgtaattgtctgtggcattaagaagtacaatagagaccacaactctgcgatattattttgcaaaggtgtaccagtcaacagtaatcttctttcagtattgaaattcaatagagcttgccacctggtagatctgaaattcttaatgttatgcgcttcatcaagaatcatataaccccatttctttctcttgaaggaattttggtcctgtaccactagttggtaagaaacgatgcaaatgtggaatgcattcggtccattccaaccttttctcttctccttacgttgttgaggagatccgtagtaagtcagtactttgaatccgggggcaaatctcttgaattccatttcccagtttaaaaggactgatgtggggacaacaattagatgtggaccccaattttccttctcacaggccaagtatgccagcagcgaaattgtttgaatggttttacccaaacccatttcatccgctagaataccatttgtgttgttattgtaaagagaggccatccaattgagaccctgcttttggtaaattctcaaagaaccacgaaggagaaatggtacgggcacatcaacaacagatagtgggtctgcctctggaacagctttatccaaaacattattggccctttctgcaactttagtcttttcttcctcaggtttgacctcctgttcaggtgtagtttcttcaacagttttgtcatccatttcgaagcccttattctctaggtaaccttcatccattaagggttttttctccttagtgagtccaagatctgaatttccattttggctatcatctgaagtgtgattatttgtatttacagattccttatccttccctttaatttcatcttcaaagacctcccgagtttctctcttgactttgtcctctgcctcagattcactctgacttccgctcatttcataatcttcctcgtctttctcttcatcctcgatatgatcatcaaacagagaactcaaacctaagccattagatgtagctggtgtagcgtcctcaccatctgacgaagctccttcctcttcagatgaactctcagttgatactaacgaatcatctgattctgaggaaccatcatgttctgatagtggctctgggctggatcgattagaaaatggaattgtttttccattttccggagcggaatccattggaggcggacttgtagttgttgcggtttcttggccctcagacgacatgtcttcgtgctcgctgtcatcctctgatgatgatatgttatcatcatctctatcgtcatcatcatccctattagagtcagtttcaccgagatcatcatcactgtcgtcaacatcactctctgatacgctttcttccacgttttgattaagctgggcacccaatagttgagtactttgttctaacattttagacaaatgttctttacctctaattttcttcagtttctcttcttcatcgcttcttaaaattttgtaagctctttcagctagtgtccatctcttcttaacggcttgcatagccgctctggccagcccttttttgcgtttctcttcctccttagcttttctctcttcagcacctgcaatatgtttaaaatattgttcgatcatttgcgaaactttacgtgctctagctattctagcctttttagaattttggaatagcttactcatataaacaccgtggttgatcaaatactcttgataggtttgtaaattttgttccttatagaaaaaagtaactgggtctggtctatgcgattgaataagtcttgcttcctttgtagttattggttgtatagaatcggtttcaggatcatacctaagagccccattctctaatccacgtcgtatggccttaaacacgtctttttgttccttaatgtaattttcgtattcttcaatgctaacatcttcgtccatggatttgaacgattccaaataattatgcaaacttttgtaatgcggttttaatacatgcacaggattggttactgtttgtcttggtggatttactaccaatttaatgcgaggtttcttccttggtggcttccgtctattatcgtcttcatcttctgaagaggtagtaaaatagtaattatcgctatttccatcgaattcttcctgatgcatgtcatcaaattcaattctttcgttcagcggtccgtctggggacttgggagccctattctgaattttgggtttcttaacagctttaggtttggaaactgcaggtctcttaatactcctacccttgtcgaattgttctcctagttcctcatacttatctcgtactagtgtttccacttctttgagccatgatccaacaccattttctggacttgagctcgatcctccaccgacggcggtagccgccctcaggttacgccttcgtactggtatatcgacactaggttctttatggttttgtaaatgtacattctctaatgatagaccttgatcctggatgaatctgttgtaactttcagtgtcgtttacgtaactaggatcaaattccaccaaagaaatgtactctttcagatggaaaagctcattcgacagcaaatcgtactcgaatttcagctgtgccagattggaatacttctcattatccctctggttatatttaccattgtctctagtcatctgttgatacaacgaattatgggaatagcataaatattgggctgttgtctaatctatactggataaaacttatattggtgaaaagttcagaatttggataatccagtatcaagtttttcaccttcttagcggttcaaaagtattctgttttgaccaggtaaagttcttatttagcccttaatgatgagggaaaaccttccttagatgtatttttcatgtttttcaaccccatcgccacctgtttaaacaatttccatgagagcgctcgttggaagtgatagtaataaactatcaccaagatattgaatatttaaatttttaaaaatgcagaagaagggagctggttccatctaaatccactacgaattggcttcaaattttcgcatttttctaagctatttagtagtatgtgttaggctcaagcttctttgtggggtgaattatgtatatttaaagcatatttagggtacatctacagaagttctgacgcgcttaaaaagaatgataatacaagaagtgccagtttgttatatttcaagaattatgtcctttttttatatattttttctcggttcaatttttcaaagtgtcatttattcactttcaattaatgctttgttcctgaaggacgactttctaatcaaaataaatgttacttcaacgtacatcaattataaatattaaagaaattaaaaatgaagttgaaacattagtggataatatccattcgatgctctgagagtaataagctataccagaaaaaaaaaaaaggaaaatcataatattaattttaacaacaatggaaaagtagaaaggtaaaacaaactaaagcgacgggtgtataattgaaattaaaaaaacaacgaaaaaaaaaaaaaaaaatacaacagtgaaatggaaacaccacgtcgcccatcattttaattgattctatttgccttgggattgaatcgaattaaatcagctcatgaaaacaacgttgaactagacatattatcatttacaggaccaattctaagcaacaaaaatcatggaatggtgggaaataatatatttaaaaataccaacaacaaatcgaaatcgtaggaatggaaacacacacacgcacacacaaaatgtaatacaaagaccaaaataaaagaaaactaatagggacaaattaataattagcgacagtcaggcaaaaacaaacccattactgccattttccaatctatccaaacttgcagtcttaccgttaataaaacctctatcattattctgtaaagcaacttgaggctgattaaggccattgtaaaatggcacacctccagtggtttgactttgcatagaatcagaatttgactgcatcggattagtagtcaagtaatcatgattcgaagtgcttgcaagaccggatgcagattgtgggaatccaaaataatcaatattttggtaaccgggtaataacatcttggcagatgacaatgatggtgcataatttggcagaggtgaaatggacttaccggcggctaaataactcatttcatcatatagagatgacataggtgtcgaagcggcagatgatgaagcgggcatatacccatacgttggctgttgcagcaaaggctgctgatgctgatgcaactgttgcaactgttgctgttgttgttgctgttgttgttgctgttgttgctgctgttgctgttgttgctgctgttgctgctgctgctgttgctgctgctgctgctgctgttgttgtaaagcattgttaataagtgcctgttgaacggtggctgcttgcttagcagacctaccccaagacagcctcactcttgaattgccgatggggaaaccttgcatcttggcaatagccgtttccgcagagattcgatctacatattgaacaaatccacagcctttaccgacagggatcttgacgtagacaatagtaccaaaaggttggaaataagcacgtaattcatcctcagcaaccagtgaagataaccccccaacgaaaacagtagtattgttgggatcggtaaagctgttcaacgcaggttgcggttgcacgggatacatgaattgagaaccactcataagaccagaattgttgccagtgttaatacccccaacagcgttagcattactagcactagcagcacctgtagcctttgattttccgtctgcagaattctgcagatgaccagcgttactgactctaatggctctaccgctcaggaaaataccttgcatctctaaaagagcacgctgttgatgagcaggattggtaaatttaacaaatgcataacctttagagacacccgtcaattgatcgtaaacaattttaacatgcgaagtcgaattgaaccgacttataaacaattcaaacaactgagattctgttacgttaggtgccaaatcaccaacaaataccgagtactcattgaaggcgcctgcgctcgagtgtgatgaagaagcccaattcaattttaatctcttatgaacaaaattggggatttgcatcccattcttgagtaatgcattagacgcatggaccgttgagggaaactccaggaagcagtaacctaaattgtttcttggtcccatggtaccactaccactaacgttattgtgtaacatcaatctgatcacaacattagactctcccaaactgccccaaatttgtctaatagtattctcatcccaactgggatctaagtctcccatgtaaagttgagaacctctattaccaacagcatttacaggtgaaccagtaccgtttatattggagttataacgaaatggtctctgaccactagttgtaccagatcttggatagaagttagaaccgctattcatcttaaatgacatttgtaccagcaaatgctaccgaaagcctcgagaaattgattgagaatttttacgacgccaaagtttaaagaactttgtacagttatgacaccaattgaaaccgctcaatgcaccaaggacaatttcaaatactcttgtccacctctaccgactgcaattaaagtcagcaaatatatctgagtcttggttcgactatttcttgtttgtaccatgttgtaaagtgcaaattagctgcaaagaagttgtaacatcaatggggttctctctttcagcccgacgatgaaaaataatcataccagaatcacgtgatgttcggaattaagaagataccatagtaaacgactctgggcggctaattatgcagaatatgccaataaatgtataccatatttttgtattgacaccattcgaactgataaactatctacagtatttacacgagtcattcaattagagattttgacctttcctcgaaatctcttgctgccatagaatcaatcacctcatctaacttcacacctgaagtaacgccctcaatgtcatatagcgtaaaattacaacggtggtcggtaatacggttttgtgggtaattataagttctaatcttatcagatctatcagtagtagtcacttgatcctttctcgcagctctttcactattttccttctccttacgttctctttcagccaatcgtgctctaagcacggcgaatgccttggctttattcttatgttgagatctttcatcttgcattgctaccactatacctgaagggaaatgtgtaattctcacggctgaatcagtagtattaacatgctgcccacctttaccaccagctctcatcacatcgattcgaatttcatcaggtctaaaagaacgttctgattgttctgcatcctttacagattctacaatctgcggtaatactatgacagctgcggtagaagtgtgcgtacgacccttcgtctctgtagctggaattctttgcacacgatgtacaccagattcatacttcagtttatcataggcccccggctcatctatactcaaaatggcatctaccagaccatttccactctgattttcattctgtgcaataacatggtacttccagtggtggtactgggcgtatccaatgtacatgtttagtaaatcctgtgtaaagatcatagcttcagtaccaccgacgccaggccttaactcaagaatacatgccttttcggcaaatggatggggtggtaaaagttttcgcagcagattattagatacctgacggaattgtggtagagaattgtcaaattctgattttgcatcatctttcaaacttggatctgtctggatcatctcttgtaaacccttcaaattatccaacagctcctggtactcctcgtacatgcttctaatcgaagacacacgagagtacgtcttctgggtttcagcatcaaacccatcacccttgcttagcgcttgatccagttgaactatctcttgtacgctctgatgagctttcttcaacaacgatgggtgtagctctttaaactccagggtggactgaaaccgacatccgaggagcccaatccttcgaggaaggacccatcgagcaattcgaaatgtcctaaacatcgaaatattattgatcttttgatattatcggattgttcaacatgtaagtgactgactcgcattgaaaaatcgattcattaactaaactcgatgacacatacaatcgacgaaaccgctcgaaaagctagccgttaaaagttctcgagagcatatccattattgcaatggagtatacaaagggtatgcatttttgttccagttattctgccttaattttcagttactaactatcgaaatagaaaagaaagttggtgaaggtacttatgctgttgtctacttaggcacaaagcagtctactgctagaaggatcgccatcaaggagatcaagacgtcagaatttaaggatgggcttgacatgtcagccatcagagaggtgaaatacttacaagagatgcaacatcaaaacgttattgaactggttgacatatttatggcatctgagaacttgaacttagtgttagaatttttaccgtcagatttggaaatgatcatcaaggataaatctattttgttcacaccggcagatattaaatcgtggatgcttatgactctgagaggtgtacaccattgtcatagaaatttcatactgcatagggatttaaaacccaacaatttacttatagccccggatggccaaataaaagtagcagattttgggctggcgagaactatgcccttagcacatgaaatcttgaccagtaatgtggtcacccgttggtatagagcgccagaacttttatttggagccaaacattacacctcagctatagatctatggtctgttggtgttatattcgcagaactcatgttgagaattccctatttgccaggtgcaaatgatgttgatcaaatggagattacttttagagcattgggtacacctactgatagggagtggccagaggtttccacttttccttcatataacaaattacagatttatccaccaccttcaagagaagaattaagaaggcggtttattgccgctagtgaaaatgctcttaatctgatgtgtggaatgctcaccatgaacccgcagaaaaggtgggatgctgtacaatgtttagaatctgcctatttcagagaggccccagcccctacggaaccatctgccatcaaaatgtgatatttatttaattttaatttctgcaatttcatcatgtgtgataaatgtctttcacatatctaccgatagctacacttgaagtgagaccaggagattctattcccaggaggttgacaaatccaggaaatccctcttcttgtttaatgtaaaaatctttaaattcgccatcaccaggggcggccaatttgggtcttataccgctgccaacgacttctaagtcgtcgggtccaatatatggatagtatctgctaatagctttaaaagctgttgggatactagcgccattagcagcatagtctgttggcgaatccacatattccaaatctggcccaaatttcatttggtaatccatgtcaatggtaagatgcgttcccagcgatttaccattcttaggtggaactggatagatcaatctgcgcacaccggggaacccagctgaagttaatttgaagtagtttcccttggcatagtactgtttaagatgtctctctggcggcaaaagcattttgcttattctgtcagcgtaaagaccagctgcattaaccagattttctgtactaacgtctgtcagctcctggctgtcactaaaatgatcttttacggtgacagtgtacccacaaccagcttcgtactgtaaatttaccacctcggaaccataaattacttcaccatcgttggcttcaatgatcgctaggaggtattccatcaacgaatgcgaatcgataatacctgtagttggagaattgagtacagatctctgcacttgaatgaatttttccttcttcattgcctctaaagacgtcatcatctccacgtccactcccaattcgttcttgcacttataatagaggccctctaagacagcgtcttcgtaatccgtttgtgcaacaatccatttcccacaattgatccaattcactccagtcttcacaggatccaactcattgtatatgatttttttaccctgtatgcacagcttgctctttaaggaatctggtggataatacaatccggcatgaataacttcactattgtggctagatacatccataccaatcctatcatttttttcgagcagtattactcgattagatttcaccttgcttaactctgctgcaatcgccaacccaactacaccacccccaatcaatgcatgagaatattgtgcactaagagatctcttaaaaaatctgtttataccacttaacccagcgtttctgagacctaggcaattcatcagataggacttcaggtgtattttgggatgctttgaccgcctaatctagaacttctttaagtataaagtggaaatttcaactgctttcattagctatatgtcatataaaacatttcggacttgaagaactctaagctcatcaccactaattgaaattttgacacattttagagcctaaaagaaatcaactgagactcattaggcaatgctgaggttcattcggattgccaaatgctatagtacggcttccctgagtcgacagaggccgcaattccatgaagttttccctcaaaagaggacggtcaacaggatactctttgaacttgatagtaagcatacgtttggcaaattgtatcctgtatacgataacatctatcaaaatatgcagaagggaattgatactgagatacccaagggtattagcccgtcagatttgatgataatgaagaaagtgttagaaaagattagacataggactaaaagtataaatcctcatttattggcactagaaaatgctctcttagatagatcagcagagctgggtaataacgatgcaatttccttgcttgcattcgatgtattaagagatcctgggcataacaatccagaagatgtagattacggcaagaaattgatcaaagaactatacaagaaaaaccatcatttgacaatgaaacttttgggagacttatcactaaagtctggtaatgacactgaggcatgcaaatattatttgaagttcttggacctagaggatagaactttcctggcgggagaagtttatggcaaattgggtcagattaatttccgtaaaccagatctacgaaaggctgaacagttttttctaaaagcaattaagctttcaccgttggaatactctgttcactctcatttttaccttgctcaaatctatatgaactcggatcctctcagagcaagagttctcatggagaactgtgcaactcaaggattcagggaatctttcaaaactttggggtttttagaaatgaattactttgaagatttttttaaggcacaagaatggttcaggttggggttagaactctttcaaattgaatgcttcataggatttttcgactgttgtgccaaattgaagaattggacaggggccaacaagtgttatgaaactatgcttaaattacaagaggttaatgctaattataaagaaattatcgacaaatttgttacaaaccgtcaagcagaagtgaaagaagctatgaaatattcttccaaaccgctttccgacccgaagacatttgagagtgccgctaaaaaggatccttttgtatcaaaggagaataagtggggactataacttccggtatacaataacatccccctcccttctcgagtcccaatgtaccaatgaattgaaaaatctagtttcctccacgtaagcattatctttcaaatgttccttgatgtaagcattctccaaatgttggaaaaccaccaataaacgaggccattcatattgataagtgtgtcgcttagatgaattaatatccagcagggggaaatttcgttctatgaatcccgaaatatcatcatacaaaaagtcactctcatccatatagtacggcagcttcgcacttgcatcaggatcacccatcaaatgcagtggtggatcacaagtaattgcccaaagacttttgatgtcatttctgtgtaaataagactgccagggagtcgaatgacagggcatgataaaaccaatactatcgacaactggccgatcatgtaaatatttcataacagctatggttcctgattcatggtaccaacataaaaggaaagcagcaataatagatcctaatggagccaaaagaagaaagcaatgcttcaaaacattgttttcctgcaattttaaagcaccaaaggtagagattaaaacgagcaaaggttgcaatgggtagacaaatcgaaattccttgtgtgataacatagaataagcaatcagattgaagcctatcacaattttaatctgagttaaaacatcagaatggcgcccataagtcagtcccagacaaaatagtggaatagtatagtttagtatgagtggtaaactctgtgtgatgtggaaatgccattggttagcaccatagaaggttgataaggggctcaatacgttaaatcgaagaaagttcaatggtggaaaaatgttctcattgtaaaaatgataatcaattatcatattaattgagcagactagggcaaaccaaaaagcgaccttgccgatcaaacgaagcactttaccatactggctcttgacaaagaggttccaaattaatcttgagccaaaaataatccatatcaatccattcgtaggtctttgcaaacacgcaaaaactgcaatacatagtgatttggtaaaatttgttgtaaaaacttcatcacctccggtccaatcccagtaatatagtgccgctgatgtcaaactcatctcaaaagagttgataaaagtccttgtaatcaagaaacagttaaagaaattggtcaccgataatatgatggtaattttctcgacattccaatcgtcatgaggtttcttgtcatccgtcttatcgaaagtcaataaatatagcttcttaacaaacaaaatggtatataactcaccaagggcagctataaaagccatcatgaccttagggaaaatgatcacacaatagtattctactttatctcccctgtcttctccccagtgatactgacaccctttagaaaccaatcgagccaaccgataagctatctccaataaaaatgggaaggcatatgatctcaatccattgttccactcccaggtgagtcctccatatccaaatgccttgaaatgagccggttctagcgcctgccagaactcatcagcctggaagaaagtcctcgtaatcaatgcattgaataatctccatccaaagagacccagcaaaatcaatctatggtgcttatcaactgccttcaatgccatcagacactccctagaaggcttattttctttaacttttcagaagacattggctgagctttataagcgaaggttcggattacctttaagtttaccttaaccaatcgtaaccaccttaaccaccacacatacttttaaatcatatagaccaaataggagagagctccttgaagacaactaccagaagtccaaaagagtggttatgctaaattttacaggccacacaagaaggagaaacattaatttgggcaataggtctgctacaacgaagcaggacctactaataaaagctaaacaggagagagatagaagagcacaagagagacagaatgaaggtgccgtaagagtaatacagacccatttgaggaaatatattacttgcgattatgttatcaagcactggaatcaagggctgacacctatggaagagaaagaacagattaaacatttagtactggcatatggtcctcgaatttatgagcacttgaatccaccacaagtctttgacattttacaacgatcacaacctatattatcgtcctatcctggactactcggtaacatacagttgtgcagaatgttgggaaactataaagatgatacccttgtagtaattactttgagcgctatgaatgccaaatttaggactaataaagaatttgtggagggattgaccagttttttaagacacacgaaatctttaagtgctaccacttgcaatccactctgtgaagttttaaatgtatggggcttaaaccgaacagaagaattacaaccattgtttgaattaaactctaacgaattgactttttaccgtccacttttggaattttaccaatgtttgggatctttaaacattcttccgaaaattaccaatcccacatctattcttctagagaacctgtcatacatttatgccaccggttctcgatctgacgatctaatatactgcatagcatcttgcttcagagatatagtacactcacctgctaatcctcaattacaagagtcattttcaaagctctacgagaaatcatttattgataaattggctagaatggtagaagaggatcaacacgaggagattaatcctgggaccattgtctactttatgcaatcagctccagaggaaaatttaaagaattcaattttaatgacactattatcgaggccgcttttcttcaagaaattgtttcaagatgtacaaaggacgacgctagatttaaattcattacatctatctgcttcctattccattttcatcaaattgttagagatgcaccttatgatttctactgatcacgaacttttatcggaaaattctggattcactatacaacaactggtaacctttactacttatttgaaagattttgtgtttgactcattgtggaactcagccaatgatgtgaaatcggagatcgttgatgaaactttatcacttttacacaagatatatttacgagattcacgtctgcacttctgctccactaaagctgagcctgactattggtccaacaaggatcaagaatttttaaatgtgggtatcttcaaatacatcgaagactacgaaaggctctatagagattttgccgaaagaagggaagaaatgtataccaatgacgaggatcaagccgttgtagatgaaatgagttcgataaagttcaaaattttggatcaattgagtacatctttcaaacatactgtctccactcgtcaatttcgtaaattacagatattgattagagcaccatttttcataccattcgaacaacgtgtggacctattttacgcttttatatccttggacaaacaaaggttaatgttggatgaagatagtacgataatgaacatgtttatgccttggggtatgcccggaatgggtagacaatcagctactatctccagagaacacatgttagaagatgcatgcaatgcattcaacagtataggtgaaaggtttaaggcaaaattagctgtcacattcgtgaatgagtttggacctgaagttggaattgatggcggtggtatcacaaaagaatttctaacaagtgtcagcgatgaaggtttcaacagtgacaaatatggattattccaatctaatgataattacgaactgtacccttccactagtgttgattcacaacaactaagatacttgtggttcttaggtaaagttctaggtaagtgtctctacgatcacgtcttgatcgatgtgacatttgctgatttctttttgaagaaattattgaactattcaacgagatttacttcgtcgattgatgacatgtgcagtctagatccaacattatattccaacttagtaaaactgttatcgatgagtgcagaagaaatcgcttccctcgatttaactttcgaaattactaccgataatggacctgtagaattgataccaaacggttccaagactagagtgcaaaaggaaacagttttgtattacatcgtcaaagtttccgattacaaattgaaccgctctcttttcaaacagatttttaacttccatggtggtatgagtatgattatagcaccacactggatggaaatgtttaactctgttgaattacagatgttaatctcaggtaagggcaaagatgttgatttgcaagatctaaagaataacactgaatatggtgggttttcacagacagatccaacgataagacatttctggcaaattttggaggaattcgagagggaggaaagattcagttttatcaaattcgtcacatctgtccccagggctccattacaggggtttaaatccctggaaccaaaattcggtattagaaatgctggttcagaactcgaaagactacccactgcttctacgtgtgtcaatctattgaaattgcctgattaccgagacaaagaactgctgaaaaagaaactgttgtatgccataaattctggtgctaggtttgatctttcgtgaattttgaaaagcacttatatatttacatacaaatgtttccccatgtttctaactttttaggtgtatcgaattagccgctgagaatcggtattatcgtcaatagtaagccgtcccaccgatcgcgtgatcacaatttacggattattaaagggatggaaacaccaaaaagagaaaaaaataaaataaactcaaacaaaactaaggaataggagatttaaggtgtatacacaatactaccaagactacaagaatagacaaaatcttttgagactgttaccaggtaccaatcaaagggtcacatctggaccgcttttgtgagttaagattgttgtgaagatattgaggaggcttttccatattcgtttttgacaagtgagaaagaaagagagagaaattcttctggattaatcgattttcttaccaacatctttataacaactacgattttttgttagtattactattttttacggttttttttctctttgggtttgatttggtttttatttttgggcaaatgattaatagcatagcgccttcattggccagctttattgggttattaggattttcaaatgggtacgttatacctagaactgaagtggttcacgatgatactgcgggggtgatgtatatattggatggcgatggtcaatatgaaggattatcaggtcagtttggggatgatgaattagatatggatattatgatcttttcacttattacaattattttcatttacatcagcatatgcttcgtttatattaccattagatttgtggttaaaagaattttaactaggaatgcaagggcaacacttttgcaagatggcgatgaagttagacgtacaagaagaactatcgaaaacctaaatgctcgttggccaagtgcactagatgatgaagatgccgttagagataaactagcacgcttatcaccggaagagcagttttactacaagcaaggtgaagagtacatcagacaaaatcctccattaattatacctcatgcgctttcttctcatgaccatgtggaagatccagtgatcgatgatgccgcaaggcagtttatcaatgaggaaggcgcatgggcatgggaatttcagccagatcctaatttaccaaatgataccattcttgtggaaaataaatccgaaatttcgtttttgaattacaactacgaagcttccgtatgtaccaacttaccgattcctcgtatcaatagagtctattactgtgaattcaaaatttttgaattaaatacgcaggacggtagtggtcatcatttgggtgagaatgaattaatttcttttggtttatccacatccccatatccatatttccgtttaccgggtaaacaccaccattctattgcatatgaatccacaggagctcgcaggtttaacgattcatttgaattagaacctaagttggcaacattgttccctcgtctggaaaagggtgatgttgttggtattggttatagatccaatagtggtactgtctttttcaccagaaatggtaaaaaacttaaagaagatacagttggtggtcatgttaaaggatggaaattcaaatatgtgtaccctattgtaggtgctaacataccatgtaagatccacgtgaattttggtacgtatggattcgtctacattgaagctaacgtcaagaaatgggggtatgctaaatccaatggtatgaagttaccaccaccttcctatgaagaatataatcaagatactctattagagagtggttgtgaagatgaagtttctgataatgaaagtgtttcttcagccaatgaaggtgacatcgtagatagtcaaggtgaattattacccccacctccaggcttcgaatttagtacttcaccgaacgctcacagccacatagaccgtgaagaaattactttagattctttaccaatggagccaccaagttattctgatgatgaacgtagtgctagcatcaacccaaaagttggtaacagtacatcttctgggaaacaccctccacgacttcatcatctaggtaaatctcagtacgatcacgtatcaggtgaagatgcacttgagcgtgaacgtttagtggatgatgaagaatacgatgacgaagatgactactatgaatacgaagatctggagtatgatgaggagcaagatgaagacggcgatggagaaggtagagaacgggcggaatacgaagccgaaggaactaacggagaatcaagaaatgaaggttatggagctcatgagaatattcacgataatactgtgacaaatcaattcttgcaaaattgatttgtgagacaaggggagaacacaagagatgagaaaatgtgggagagaaacatgtcatgaagataaacacattcaatgaacgctgcttaagggaagcaccgtttgcaagtagctgaattagagcttgcgaggtcaaaaaaaaaaagcttgacataaagtgttgtacaaattgtttactaacatgtttttgttcttggcaccaaatatatctatctacacatactgtcaacgcttagatttttttttttttttttttttgttttttttcatcatatatatgttttactattccttcctatgtagattactgtgataatgcgatatttataaaaaacattacaaaaacgatatatgtgctgatatatgtcgacgacgaggtctccgaggccattcaagctaatcaaataattaccttgataaaaattaaagccatctggtatcgtcagttaattctggtggacttttgaaaaaatccggcattccctgtaactgattatcatgggacaaagatagcaaatttgaaccatcattactcgtattcatattattattactgctattatgacttcccgcgtccttaatagtagttgttggatccttttctaagcccaaaacatcatttgacgtatcgtcatattgatcaaagaaaggggttggcgcagtagcagatggatgatgcatggataatgggttcgaatccattacaaacggctgtggaggtggtgggggtataatttgatttgtgctgttataatctaaaatcaaagaattcataaatctcaaagaattttgtaaacctttcaatgcatgtggtaaattggatccaccaataaaggcatcattgacttgtcgcccttccgaaaaatcttcacaaatggaccattgattattagtagcttcatctggcgcctctagaaaatataccgcaaaattaggcggtcttgaaacatttattttcaattcacccaatttttcactatcttcattggaagatctgttatcatcacctagagaggactcaccattttcgtcatcctgctgatctgaattccttggctctataatatcattggcctctaaacttaatgaacaattaacaactgagttgattggaaaaaaaatgcggaataaaatctttgtattgtttgccatagcactaaagaaataattaatctcaaaattcttcttggatatgagtaccattaaatctgtagcgttcgacataatttcgttgattgaaattggtgaaaggttagacaaatctttaactgtagaccaattagattttctaagcgcaccacttttcattctattccaactaccaaccgttatggaacatatatcaatgaagtagtagttgttattaatatttaaagggatctgatcaaaaagcgtggaattttctccattatcatacgaatagaatgcattactgtcaccagtattatcacccgtcagtccaccactaccatctctaactccagctctatcgtctttcctcagtttagctcttctgttctggaaccatatcctaacgtttttctcaggtaatccagtcatttctgacagctttttccttctctgtgatgtaggatttggatttgtttcaaactctctttttaaaatgtcaagagcttcacctctagctctggttctctttggtttgctgctactattatcactattactaataacactgttcgcagtaatagttgccgattttctatcttcttgaggtgacgtagaagagctattagggaaagaaacagccgcattgacctcttccataccagtttgtccattggagccttctaatgatccattgtgggtcccatgtgaatctgccccctgccccgacagtaatgccaaatcctgcgggaagtgggaatcaaaattctcatcgtattgataatccattttaattagtttgtccctaagccctttgaaggcagatgaaaaactcttgaaagtcacacctttaaactagtttcccttaagtatttaccttttcgtattgtacttagtttgagtcaaagacttcatgatgtcttaaagttcgtcaactttaaaggaaaatcgtcgaaattgatgatcctctataaaatatttccgggttcaattctcacgaaatgaattattttacatctttaaagaaatattcaaaatttgcagtaatttacatagacggccttcacattggtaaaatttagtaacccatagctgcccaattctctaccatgtcctgacatctttacaccgccaaagggcatgtggaagtcaaggtcgttacttgaattgatccacaccataccagattctacttcatccgcgaattcatgtgcttgtgcaatgttttgcgtaaacacagaggcacccaatccatattgtgaatcgttggcgatcttcagagcgtcttcgtagtcatcaaattgacctactgacaacacaggaccgaacacttcttcttgagcaattttgaaatggggttccgcgtctgccaagatggtagggcttgcataaaatccaccgttatgcttctcatcgcttgctactgtctctggcaggcctgaacctccgaggactactctacaaccttcggcaacggcaccgtcgatgtaattgaagactctagtttgttgatctctggtgatttgaggccctacaacgacctcagggtcctcaggtacacccgttgggaagttttcttttgtgtaagcgactaatttcgttaaaaattcgttgtatttggagcgttgtacaaagcaccttgaagtacctgagcatatttgtcccatgttgcagaatataccaaatgctgcccatttaacagcctcatctatatctgcatcttcaaacaccataataggagacttaccaccacactctaacgtaactggtttcaaattgatggctgcgtttttttgaactagttgtcccactcttgtactaccagtaaatgcgatcttgttgacgtcgagatgacttactaacgcattaccgacagtctcaccttcaccggaaactacgttgaatacgcccggtgggaaacctgcctttacgaccaattgggcaaagaccagtatggaaagtggtgtttgatgtgcggatttaaacacagctgtgttaccagctgctatcgcggtccatttccaactcatcatggctagcgggaagttgaatgggataatacatccaacaacacccaatggctggtgtaaagtgtaacataatttacccttggctggtgaaaatgcgtctccactagtcttatcgatccaaccggctaagtattttagggtagcagaaacggattccacatctcccgcagcattggtctttataggtttaccagaatcgagagattcgacttgtgacagtaggtctacattatcttctaccaattgggccagtttaagaaacagatcccttttctcgactaatgacacggctttccatggtttgaacccgtttctagcggatttaacagccctatccacatccttgacgggatcagctgcttgcacagatgtaattacttcgccggtacccggattttcagtagtcagtgtactaccattgctagaaggtacaaattcgttatcgataaatagacccaatggttgtgaatatttctgtcccgagggcaggacgatttcttggtaaagcgacatgatgtcttgatcaatgcatgttcgagggcataattacccgataacactacaccaattgtatcccacttttatacctctggctttgcttaaataacaataagccgacttgtacgattgataactattactgaagccatctttatcacaagagccacgaggcactgaagtttttcaataatcgcggtgtgtaatcagtaatttttcacgctggcggaagtgtcactgtgtcatcaaataatgaaatgaaataaaatagaataaatcaactaacatacagaaagttatatgataactgcagtagagcaacaagaattgagtcaaactgtcagcggaatttcccttcatatctaactacaatatacgatagaagatgagatcgggcgcacaggtaaaccatcctatctaaattaaacaaatctaaaattctttaaagaacaattcttactcaattctagcaactatgagctacgtagtgctggcgtatgcggtcaattgatctcacttaattttgattactaattccagcaagatcttgtgtcgatttctgtcgtcgtgtcgtaagggggcaggggaatggagggaactctaccttgcttaaaagcaagttgtcttctaagaaaacgaacaagtacactcctcgcatatcagaagacaaagaaggactatatcaactctttatgttcactccaattcatatcccacaggtggggattacttataaacaacccattggccttttcattaataatgaatacgtcaaatcgaaggacggctccctaattgatactttcaatcctgcaacgggtgaaaagattacttcgttttacgctgcaggtactgcagatatcgatgaagctgttcaggcagctagaaatgcctacgaggacgtttggtccaagacgactccctctgaaagatcagaactcctatggaaattagcttcgttagtggagcgtgataagaagttattggctgcgatggaaactctggattctggtaaaccataccattcaaatgcattgggtgatctagatcagatcattagcgttaccaagtattatgcaggtgttgttcaaaacttgacccagggaaaacagattcctgtgagtcatgataagtttgcagtcaccttcgaagtaccttacggtgttgtaggacaggttgtcccctggaactatccgctagccatggctagctggaagatgcagggctgtctggcggcaggtaatactattgtgattaaacctgctgaaaacacttcactttccctgctgtattttgcccaattgttcgtggaggcaggttttcctccaggtgtagtcaatatagtaccaggacatggtgcccaagctggtaccgcgctggcagcacaccctgatgtggacaaagttgcgtttaccggtagcactaaagtgggacaggcagttatggaggctgctggtaaatctaatttgaaacctgttactttagagtgtggtggtaaatcgccagcagtagttttcgaagatgcagagattgagcaagctgctgaatggtgtgctctgggcattttctacaactctggccaaaactgtaccgctaactcacgtatttacgttcaagagtccatctacgagaaattcttgcaagaatttaaggctcaagctgccaaggcgtggaaattcggtgccaagagagatccatttgatgaagagtgtactcttggacctgttatttcagaagttcagcagaaacgtgtcaagagctatattgagcatggtgttaaagaaggtctaaacatcgaaacccttcacgaattaccagcagacgtgaagggctttttcgtacagcctactttctttaccaacgtacctcagagctctaaattaaacagagaagaaatctttgggcccgttgctgttatatctacttttaagaatgagtccgaagccctcaagttggcaaacgacacgaactacgggttggcatcagctgtattcactcaaaatattggtgttgccacgagattcgtcagggacatcaaagccggtactgtttgggtcaactcttccaacgacgaagagattagtgtaccatttggtgggtttaagatgagcggtattggtagagaacttggtgaagccggtctcgggtcctacttacagacaaaatctgctcatttcaaccttagtgtatcggcacacaaactctaactctaactttagtgtgtagttgcagtacgtagtagtgctattaagatacgcgatgcgaacttataagtaaatattctatctaatatacgcaagcgaaacaaatggaaataggcttgaagaaatctaagcatccctgtggcgtatgtgctagacgtaaagttaaatgtgaccgattgattccctgtaccaactgtattaaaagagggcaagagaacgaatgtgtagacaccggcaaaagagatgctgaaaagaaggattacaattcagagttaatcaagttttggcacacctacgagtattatgtgcttgatgtgggtcttttcaaattgcagttgactgattccaatgggaagttggaggatttcagttcacgttggggagatgtgcaatcgataatggatttagtagatttggatcaatcatttcaattgctcgactattctatggaaagattgggaccattattttttggatgccttagtgatattggtgagatatatgttaagttagacgattactggggacgtagggatgagggtgttccatccaacctcgatgaatgctattgggatgcactgctttgggcgatatttacgatggcagtatactacatgacacctgagaaattggcaacagtattttcagaagatcaattacaaaaatgggtgggtcaagaatctaaaaatacacaactaaaccttttacctgccttcaccgaatgtacgattatgcaactttacaatgccaattttatggccaatccagatatcaagttaatacaaatttatttgatcctttgcaacacgaatttcaactggtctaatacccatttaagtagcacgctactgatactatgtttgcatgtagccaaaatgttccacatcgatgactttagatctttgattaacgatagtactgcaatgaagttaagtaaattgacctgcgaaaaactgtggtatagattgtgcacttatgactatctacaatctagtcctcagagatcaatcagttgtcatggagaaatttcatccctattacaacatgcagcttacttggaggatctgccgaatacagatgttaaccagagtgaagataattttgaggtattatactggaaactaatctcgttagatagggatttggatcagtacctggcatctcctacaaaaccacctttaaaaaccttagatgctattcaaaggcaaacagaaattttccagaccaaaatatcaaatatggtagaagaagaatcttttagttcagcatttgaaaaattcctagcaattttcctcctgaggagtgtctgttggaaacttcacaagatgtactttatcttttacgatacttccgattcattgacagcttctatccatcatgccaaatctctcatagctctattggtgaataatgtgagggccaaaaaaagaatattcttcaacaagcatccaattgtcttgatgactttttcaagggtggcttcattctatgcatttgccaatattttcatgcagaagctgacagttgaagagattcatgctgatttgaaagaacttctagcccatttgccgcccacgttcggatataaactcgaaaatttgacgtatttagtggacagactagatcaattaaaaagcatatgggagaagattattttaatagattctaaaaacccgttccagcacccaattatgttaattcttaagaatgatgtagaacgaatctaccaaattttacaaaggggaccgtcattgatcagaggcacaggtttgcaaagcccaaaaagacttttccaggatgattatgagtttaacatggatgacaataacaaagaaatcgcactcatagtgatagaattcgagaagaaattcgatattggtggcatacttacataacttgatattaacatctctcaaagactctatacaatcccggtaaattagcaatttcaacaatatctttggtcaagtgtcgaggcgctagaaatcgtttcttgatacaaggaaaaaccacatcatctaaaaccaccgacaattctttagttttatcaacaaaagccgcctttttatcctctggtatatcactttcctctaaatcaatgctctcaataatttccggaacgtaaagcaatgcgagttgcctcattataccatcgagacaaggttgttcctcttcccaattgacctttgtacccaatctataaattaaaaagggtaatttactcaagggcggcaaatagccttttaataaaagcgggatgctcgtaatttttacactttctaattgggtattttcatcttctgcatcagtattgccagcaatattgatcgaaaagtactcactcaacatttctctcatttcccaaatcttggagatgatagccttgatagatttctcatcaaggttctcaaagtgtgataatatatgaaccaaattcaagctggaatcatttccactttgtaaattaataacaccaaaattcgcaaaatcagtaagacaaatttggtagaatagctcataacatactgcaccatagtcaagcagaaataactttaaatcatgctgtatagtggccaatcttctttccccatcaactacaccgacataagtcatattggcaaaaatatctgtcagatctttatgagcagaactatctgctgcctccagaagtcttttaatacttgtcaaattaacatctactctttctttcgggacaattgtatatccatggacgttagatccccgacctctaagaggcgaggattccactttagtagtttcattattatcattccaaggtgattctctagcattttctattccctctcttccttcgataccttcggctactaccttttccgtagaccgtagcgctattggtggtgtcgattgattggccatgaacgatgtaattttagattgagatgcatcagtcctaaccaacttattctcatatctcttaatactgttacctaatggtgattgcttattttgtacaggtgtatgaggtgccttagaaacggaaccttttggaccctttgtactctcaaacgtctccttcaaaggctgtggagtcacaatagatgacgttttaaaagtacgagaagtatcaattttggataattcttcattaagcttagaggatatggcttcaatgatttcctcctcatgcaaaaacctgacttctctcttcgtaggatgaatattgacatctaatatttccggattgatcaaaatgcttaaatacatgaatggtttatcgcccttaggcaaataggtggaataaatctgacggagtgctcttgccaatggattgcaggttaccaatctattattgatgaagaagacaggactaattgattttttaaaactaagatccaaattactcactttcccgactaccttttgaactccaaattcttccaaggggcctaattctaaatccaatagctttgaggatacagtacttccaaacacacatctaatcctttctacagtgcttagattagctctcacggtcaatgcaaattgggaatcaccaaacttcttacatgaaaatgcaattccttctgaatgacatgcatatcgtcctacaacatctaaaatcttgctgtactcctcactggatgatcttagagctcgcagtcttgatggcatgttgtagaataggttctccacgagtatcaccgtaccatctttacccgctacaggcttaggttctccaatcattttaccatcagaataagacactctccaagcacatctatcatctccagtcttagtagttatcgtaagccttgcaatgtgggaaatactagccagtgcttcacctctgaacccataagttgcaattttctccaaatcctcgaatttagcaagcttagaagtggtaaaccggtggcacagaatcggtaaatcctccttgctaattccagagccattatcagtaatctgaagtagcttgatcccaccttctcttaccaatatatcaagcgatgaggccccagcatcgatggaattctccatcatttccttaagggcattgacaggggatatgataatttcaccagcagctatcttattgactactgattcatccaaaggcttgattttggacaccatttttgttttatatcctctggtacctctactattcaagctacttgtatgtttaaatctgatccgcgaaaccaatacttctaatgtctataaagctcattggaaagaaacagtcgccgagaaaccatcgaaagctggcatctaagagttttgattatcctagagagattcagcaggctgaattttctatagttggaagaaatcgccatggctgttcgtagtgataagagacgtcgtgattctcaggatgatagtagtagacaggttgacaagagattaagattagaggggggatcacaggggacacagggaactgcagttaatgaagtcgaatttgaggtcctgcaaggttatagaaagttttctgaagctgtagcggaagatcgagctagaatggcacgtactggtgatattgatattgccgttaaaaatttacaagcagtggattccttatttaatcagttgacaggctctagaaataacggattatttgcccatgattctcgtgccatgttgagtatcagcgaactggctcagatcagtgtaaggaatttaaagtttgataactttagaagtttggtgaatttagaagatgttttgaatagtttgaaaaaatacatgcttagggattatttcgaatggaacggtatctcagaaggtaatgcagcatcttctatgatgaaccaaagtcagaacggggctagagatggcgaagaagtcggaggagatgataatgatgacgaagaagaggaacaaagtgataatattagacaaactgaaatgaggaaatgccatctcaagcagtacagtggttacgaagatttttatcaactcaattggttcaaattgggtggtcttttcaacaatttaagcagaaaagtcagtacagtagatcatctgttgggacccttttcaatgcagagaaagacaagagcaccagtagtacgaaaggaacaagatactgtaggagctcttaccacagcggaaaaagtgactcaaagctctttaaattctacacaacaaattactacaccagagcaggtaaagagaatgttcaaaatattagagagaaaaaatggtaagcgccaaatcaacttgttcaaatttgtgattaatcctcagtcgttttcgaaaagcgtggaaaatctcttttatgttagttttttaatcaaagaaggtagagtagttttagaggaagatcaagatggtttccccagtataagaattcgaggtgggccgccgacggaccccaaagccagggaaattgaaattagaaagagacgtgaagcttctgaaaaccatataatttttcaaatggatatgcctacgtggaagaaattgatagaaaagtttgatatacgatcagcctttgtagaataatgcattaatgtttctatttacaagaacatatataatcatttagtagaatcccaacatggaacctcaagtaaatgagtgagaggccatttacgaacgggcgttgcttgtaaatctgtcgttagacagtgcttctcaaacaattctatgcctgcccatcctatcattatcgcgttatcggaacacagttccaatggaggatagcaaaagttgtcaaaggtatcaccaaattctgtctctaaaagattccttagccttgcattggcaccaacaccgcctgataggacaaaactggatactccttcgaatttttccttgtttagcctaataacaagcttaagcttagtaacaatgtgatgaaagatggcctcttgcatttgataagccatcgatctcacttcatgtacttgatattccgatagaggttttgtcaaattgccttttaatgcggtaatgaatggtgcaaacgagaacgcttggacatctactctggtagatttgttcctcaaagggttaggtaattgcataggtacgttcaattgcaaaggttcttgattgataaacttttccatctctttggcgatcatattacccctgataccaatttctcttccacacttgtccagtgaatcgcctaccgctatatccaaagtatcacatagtatctcgtggtcgacacaactccttgagagaacaagtacagtatgacctccacttacaaggagactgacaaaagggaaccgtgggttttgaccattatttagcatcctcggtatcagtagatgccccagcatgtgatgcactccaacaaacggcttcttccatgcaaccgctaaacctttggcaaaatctaacccacctgaaagtgatccaggcattcccggacctctagtaacacagacgaggtctatattgggcataccggccgattgcagtgcccgatgtgttacaggtccaatctgctgctgatggtgtaaatgtgccttcgtcggtataattccacctgcagaagcactattaagggtttctttcaaatgaacgattgttctgggaggttcaatagatgattttctgtccaatatggcaacgcatgtatcatcacatgaagtctcaatagctaacaccttgtaccatcttttagccaccgtatgcccaacgggaaaagctttgctaagggtaaacatgtattccaaattcaatttacggtactaatatgccatgtaaatggcttcttaggcctctattcccccatttcctactttcgtttagctgatcatcaaatttgtatatcaactttttcaaaggaatccggtccaatcgacctaaccatatacaaactttaaaagctaaatctacaggttaaacaaaagcagtttaaagaatcagtattccagccttagaggcaatttagttaggcttcacaagctgatacgtaactttggtttgaaactatagaaagtgctgcgagaacttcccgcagcaggagcttaaaacgtcgtatccttgttgaaaaacagtgctctgatacgtttttgcaataatcctcgagctcaattgcatctatcgaaatgtggtcgttaacctcttcattacctattgttcatgcgcctcaccaccatggtcaccctcatgcaataccaccaccaactacaggtggagccggtggtgatggtggtaacagaccgagtccaccagcaatcgacgatgaaatggaggctactaatagtcccattttgcattgtatccttgccggtggatttggtggtgccatcggtgatacttcaatgcattctctagataccgttaagactaggcagcagggtgctcccaatgttgccaagtacaagaacatgttggccgcctacagaacgatcttcgtcgaggaaggaattttcagaggcctttatggtggatattcagctgctatgttgggatctttccccagtgcagcgatcttttttggtacttacgaattttccaaaagaaaactgattaatgaatgggggtttaacgatacgttgacccatttatttgccggttttcttggtgatttagtctccagtttcatctacgttccttcagaagttttaaagactaggctacaactacagggtcgttacaataattcacattttgattccggatacaactacaaaaatctacgagattgcataactactgtggtcaagaccgaaggtccagtggcattactctttggttacaaggcaacattggcaagagatctaccctttagtgcgctacaattagcattttacgagaaatttagacaagctgcatttaaacttgagtacaaacaaataggccaggaccacttgtccataatgagtgagttgtcaacaggtgccctagcaggtggtgtagcaggtgtactcactacgccattggatgtgataaagactcgagttcaaactcaacagacttcccctacaagtgaactgggcaaacctgcaagtctttccagttctcttttctccagtttgaggatcgtttacaaatcagaagggttgattggatttttcagtggtgtgggcccaagattcatctggacaagtatacagagcagtattatgctgttcctctaccagtacactttaggacgtctcaatacaattttcccttcaaataatggattgggctaaaaatatttaaggagtcacctctttggaaggtgacaattgaccattttgctactgcaatagtaattatattctctgtgtaaatagtaagacaacttctcgattgaatttcatccaggacggtcaattaacggtaacttgacgtctaggagctcctcaaaattatcaattcctcgaggaaaatattcaaaaatgcattttttaagaatttatatctcgttcatcagtgttgatccaacggtcctttatgctcccaacatctcggagaggcgaaaaaaagatgcctatatacaatatataaatatactccttgtacttgcagatacacacagaagagggaataacattcaaggtctattgaatatactggtagtaagactagtagctcattgtttgaagtcttgacggctcctagaggtaaaatgcagtacgttgagagggctattggatcagtgtccaagacatggtcttctataaatccagcaacgctttctggtggtatagatgtcatagtcgttgaacatcctgatggtacgttagcgtgttcaccatttcatgttaggtttggtaaattccaaattttaaagccatctcaaaagaaagtggaagttatcgttaatggtaaatcaaccaatatccccatgaaattaggggattctggagaagcatattttgtgttcgaaacgagtactgatgtgcaaggtatacctgaagaattgttatcatcgccagtgatgagtgcaacgagtagtccgccacaatcacctcgaccagatggtcaggttgaagaaagtgataaattagaagaaggagtagaagtgtctaagaaattagaggaaccggatttcctagatatcaatgattcagaaagtagtacagatacttccaatggcactggaattccactcccgacaatgtcaagaacgaagacattccaagagaagttaaatcgaaggcttacgcagatccatattcctagcaaattggacaacaatggtgatcttctactggacatggaaggttacaagccaaataaggataaagttcaagatacggataaccaattgaagcaattgcttaaggatgaattgggtaacgatttggacatttcaggatttgttaaggaagattctaatggtaacatcagaattgttaatccgtttgaaaatcacccacatcatcactacccagtctcaccaccagaatcaccaccaatgacggcaaacgaaccaggtttaagtctagatttttcaggcgattcatcaacattatcaggttttacatcgagcaatacagaggcagatacaaatacaaacactaatacagattctaaaggtagcagtactagttcagatgggaaattttttatcaagacacttcgtttatcaagtgaacaattaaaatgtcttgatttaaaatatggggaaaacgatttaactttttcagtagatcaaggcagggccttggtttcttccaagctattcgtttggagatggagtgttcccattgtcattagcgatatcgacggtacaatcaccaaatctgatgctttaggacatgtaatgaccatgtttggaaaagattggactcacattggggttgcaaaacttttctcagaaattgcgaaaaatgggtacaacataatgtatttaaccgctagaagtactggtcaagctgattccacaagaagctatttaagatccattgttcaaaacggtaatcgtttgcccgtgggccctgtaatcctttcacctgatagaacgatagcagctttaagacgtgaagtcatactaaaaaaacctgaagttttcaaaatcgcatgtttaaatgatatgagatcgttatacttcgatagacacggtcactttaaaggtgaagctgaagacagacgccatgaaaaggaaaatgaagaaagagtcttggaacaagaacaactgtcattggaggaaatggaagaaaaaccaactccctttttcgcaggattcggtaacagaattactgacgcactttcttacagaaccgttggtgtaccaagttcaagaatctttactataaacccagatggtgaagtacacatggaattattagagttggcaggctacagaagttcgtacgtcttcattaacgaattggttgatcatttcttcccaccggtgaacaacgatgatgacgacagaagtatcagatccgccgggcccggatcaccaataaacaaatcaatcgatacagacgcaaatattgaaagcaatctgtatttgaggagcaaacaagaggaaaaatttacagatgtaaatttttggcgtgaaccaataccagatttagaagaacttacagatacatcaaattcagatggcgaagatgcgaaatcaaaagacgcaagagatggtaactacaatagcaacgatggcagatcttccatgctagacaaatcgctatcacatgaccatctgcaactatcatcaccaatatctttcaagaatggcactcctaaagaaaggtcaccatcgacagaatcaggaaggaacatcaagggaacatcactcttccgttcgatctctcccgagagtatagatgaagaagaccacaacgcatcgcatccacagctaagtacgccaggcagagataaaacccgcccaccaacacgtgaagaaatcggccaacagatatacctcgagttaggttccccattacggcaaccacaactgctggaaacgacaagagaggatgtacctggaactccggcatccgagatttcgaggttaaatatcagtgaaagtgaaggtcccagggatagcggcaaagacaccgcctcatgtgaacaagaatctgatcaagatggcgatgacgaagaagaagaagaagatgatgacgaagaagacgacgatgaatttgacgaggatgagttcacgtaatatagtatgatatagtaacgtattacgacttataaaaatgggtaatcccgtaaacaacgtaaccaatacaaacaatgtcttgtccttgtccgttgtcgcctgtccctttatcctttcctggagaaccgaattacgcattacttagtcaatttggtaatccgacaagtaaatccgacgagtaaatccgacaggtacacatattacgtacctagcgacaaaaagaaaaaggaccctctaatgagatagggaacgaaaaaaaatgagtttaaaaataaattcttggcaagaaacataatagtagtaaacttaaccataccggtaaaaatattaacaatacggtaatattcattctacgcttttgtcgaagcaaactttaccgaggtttgtgcaggaacttttcacaacacatactaatccatgattattgttcctctaccttcctgaagcaatcatggtgagacaggcgtcaacgtttgaaggtatatattcgactaacaaaccagaatatccggatttcggtggagcaggcgggccagcagtagatatgtctggtgattcaaaatatggaacaaagagtgggaacatcatgcccagctctaacacagagctggatagtactactactgttgtgtctgatgccaatgcaagtgatccaagacagttactgcatgcccacgtctacaactatctagtcaaaaatggtcattatgcaactgcaaggcaattcttgaaagaagcagatctaccgttggataataagaacgcgaatgaaattatcaataatagtgtcaatactaatataaacaatgacaatgaggaccagcagctgcctccaggtttattaccaacgagattgcaagtggattctgaggaaacactactgttcgaatggtggaatagcctttgtagactgcatgatcatgtggaacaaactccagtagaagaattacgttcgactccacagaaggttccaacacctttcctgccgagagttaggcaaccatttactgaggaccaacaagacaatgttggggcttcagtttcgaaatagaatcgtcatcagtaatgatcgacgatggcataagcgaattcttaaatcaatcaatatggggctgggataacggacggctattgtgttatatgaattctaccaaaaaatgaggctcaaaaggttacccaactaataatatgtaagataatccccggaatctaataatatataaagggatcttatatccatctaggaactaaggtatcctaaaactaaacgaactgacaaggtattatcttttaatattttatttaatgctgttgggcatgataatatcttacgtgattatatccgctaacaagaaaggctctcaacaagttaatatggtttcgtggtctagtaggttatggcatctgcttaacacgcagaacgtccccggttcgatcccgggcgaaatcatttttggtggagacgccggacttttttcttaattcctttttgtgaaaaatttcaacaaacatgtttatgtttacgtttttgatcctagagtaaaaaaacaaggtcaagatgagcactgagaaaccacgacaacctttcggattaggaagtcagtagtgactgtgtcttgaatcttaaaaacaaaagattaatttaacttcaattgcatctgcttttaaattttgtactatccacagctcgtccacaatgcaatgggggttgatcatttaacatcatcagtagacaccctgttggaaaaatcgatgttatcacccattggttggaagtgtgaaaatttccagtcaaacatacatccatctgcaccaactgttgtcaatggtggggaatgggaataccaattcgaaattccaaacaaatggaatcaattaatagatcgagtgtttagccgattgccgtctgttgcaaatgaacatttccttgaagaatttcactatacagtagtttccagcgatctattgaatgcttcgaatccatggaggctatccaagatgtccaccagtggattacttccgacaataatcccagacaagtctaagacaatacgtattagaaatttcccctacatgactaccattctgcacgtaaggaaaatcttaaatcgtttgaaattcagcaatgggagcaggagaagagttgtcattactttgctcatcgccctttatttgacttaccaacaagaatttcacaaaatgcaatcctcaaggcaaaatgcgttatcgatattgaaatcaatgctagactctctacaaagattaacggtactacaacataactattttgcggctcataaagaaatctcaaatcaatgtggtagcgatagaattggtctcgttgtaacagatctccttggatcgagtctcgatttactcttttatagtatgacaaacgctacgcaggatttgttaacaattagtaacagctccgaactgtctaaatactgcggaatctatggtgtaccattatctgaattatactacagactcacagaacctgctaatgatatggaatcacgatggactagactaaaggtgatgagaagctttatgctatgttgcctactttcacagaaccattctggtggtagggtcggtaataactctacttgtgatttggaaatgtgcaatttcttacgcaaaattttccccaattataatttaacccaaaactcattaattaatcaatccaatagatggaagttaataaccactaatatgcaacagttgcaaaatttaactgtttcaatgactgcgtcgatgttaaggcataccgagctaatcaacaatcaccgtaattctgtgccgaatgctagaagcgtaaagaggtatagtaaattctatttaccaccagaagataaaaaatcatcatcacaaggtccgatacgattatcaacaacgttacatggtcttagagaactggaaaaattacttattgtcacgaacgaggagactacgactactgattcgacgattgagctcgttagacaaaggttaatcgatttactagcactatggcaaactgatgataatgacgaggttgtaagccagggaaggaaaaatggtatatctaagaccaaatttggtaatagaggactttcactagatgttgtacaaaatccaagagaatctatcattaaatgtggcgggccacatttaaacttatcaccaaaattaaaggatcatgttgtatttacacccgtggacgaaactcaatcagatatagaacaagactcagattatgaattacagaagacagctgccactgagacgagcaacgatgaagaagctgtcaattctaagaaaacattaagatcttctgataaaactttaattgatcaaagaatagccaaatttcaatcattaagtgacgacgagttaagacttaaattggaagaaggcatttcgaaatttgcccaagaaaacaaaaaaggaaggcaaaaattgagaagtcaaaaatcttttgaattactgagaaaaccacacaataaggaatttatgagtgtacagggtgccctacgtcaaatttcttcagcttcagaaataactctgaacaacacattttccacggaagaaacgatccccatgtattatgaattgcaaaaaatcttagataaatgattatgatacttaatatatttaatattaattctctaatactgtattatctttgtcaaaaactttacccttgtactgtgacaaattttcaccagcataactcaatttactagaaacttcaacggaaactccatcagcaatttgagcaccaatttttttcaacctattaccacccaattccaaatatgctgctctacttgtttctggattatcattggcggtaccaggagcattcttcaaaggtgaaaattcctgagctctatccacttcaagacacccaaatttgtccaaagagacaccaggaaaaacatcaaagataaactgttctaatttgataccattaggttcagttggctttaatgactcaccagttgtgttatcatagcaaggaattttcttcttagcaatgtggtaaggcatgtgttcacaccattgatcaagatctcttttcaataattcaacggaatagtagtggttaacaatgttggcagcacgaagtttcaataatccactagaatccttttcagctgccaattcaggagaaatttccgaatactcaatgacacatggtttattatccttagtagcaatcaacccaacagactcattagcgtctctttttctgaccacttttgtagctaattcaaaaccatgtttaatagcaaaaccaataaagacaggatcagctaattttgataaaacgttatccacacagtacatgtaaacgtgtttgatacctttcttttcgaaatcttgcaataactggttgtccttaatggcacgatatagaccaccgttaccatctggagattccaccaaatctgtgggggagctcaataacaacttttcaccttgcaaatccaacgctggtaaagtaccttgattaaagaagaccacttgtgaggattccaatccaaagtagttatgtttctcgaaaaaatcctttgtagtattatgtgtaggctttgaagtcatcacataccaagggattggacttttggtacctgataatctctgtaggctaatcaatttttcagcttgtatttgaaataaagatttatgggatggcaatccaatatcataacaacctttgggggcagacgagcctaatctggtaccttgaccaccagccattaggacaacagcaacttcaccattcgtgacagactctagaccgatcttataatattcctcctgggcagatgcattgtcgatcactgattggtaagaagtagctggcagaggttctacgctagaagagtccctagcattttcagcggattgagaaatagccttcttacagtcgtctacaagtttttgaggtgagattctcctagaggcagcctccaagttactcaaaaattgggatttatcggtctcattcaattgatctaaatgttggaacaattgctcctgaccagcagatttataaagatcaatcacactcatatctaactgatttagaataataatattcttcaataggactggaagttgacttctgtggccctgattgtacttagtgtttattgtacatgtgttgaaatttcgtgtaaggaacagacgatcttgatctggaccttaaaggcgagttaagagaaactttgataccataaagatacactttgctgtgcgatcgaggttgcgatttccaccaaactggagagctaaccaggctctgaattacaaataatatgccagatactccctcgaagagaaaaagagcagcatccctgcgaacgcagctatttaacaaacacatgtatgagttgttcaatgggaataatggacaggatatagagctagcatatgtgaatgagatggatggtgatgagaatcagcaattagaagatgaagatgaactcgaagaagatgatatcgaagaggataataatcaatttgagaacaagggcaggcccacactgttcacaaaactaatggacgttttattgaatagaaaacgtattgtacgtagtaaggatggaaggcaaataccgatttcattggatcatgagacagcagaatacaggcgatatgcttataaaaatgggaaccttttaattgatgagagaactgagcaaccttatgtagataaccaaattacttcttccaggtatacggtctactcatttctcccccggcaaatatacgctcaattctctaagctggcgaatatttatttctttttaatcgcaattttgcagatgattccaggttggtctaccacaggttcatacacaaccattattccattatgtgtatttatgggaatttccatgacaagagaagcatttgacgattttaaaaggcatcagttagatagagaggaaaatgacaaaacggttaaagttctgcgaaagaccaacggcggttacaataattttatggcaactagtcaaaattttacggagttgaacaataacagatcaaaattaccagctcaagggactttggataccagatttcacaactttgaactattatcagaacgtcatggcgttaacattgaaaagagaaaatggaaagatttgagagtaggtgattttgtacttttaaatcaagacgattgggtaccggctgacttactgctattagcgagcgatggagaaaacaacgaatgctttatagaaactatggcactagatggtgaaactaatttgaaaaacaggcagccaagtgctcagctaagtaagttggctggtgcggcttcgggtttagctaatataaacgctaaagttatagtggaagatcccaatatcgacctttacaattttgaaggtaacttggatctagaaaatgatcaaactggcgaaagcatcaaacaccctttgggtttagacaacgttgtgctccgtggtagtatcctgagaaatacagagaatgttgttggtatggtcattttcactggtgaagaaactaaggttagaatgaatgctattaaaaatccaagactaaaagctcctaaattacaacgcaaggtgaatctaattgtgatatttatggttatcgtcgtgactgcaatgtcactcttttcgtatctggcccatattataaataacagaagatacatcaatggcgaccaggcgtggtatttatttcaacaagatgcaggtactgcccccactatcatgtcatttattatcatgtacaacactattataccgttatccctttatgttaccatggaaatcatcaaattgatacagagtaaacttatggaatgggatatcgacatgtaccatccagtaacagatacaccgtgtgagactcgaactgctacaatattagaagaactaggccaagtgtcgtacatatttagtgacaaaacaggaacattgacggaaaataagatgttgttccgtaaattctctctatgcggtagttcatggattcataaagccgatccctcggctaacgaggatcaacttccctctatacaattgacaacagacgttgaaactgtatctcctgaaggtaatgagattaccggtgatcacagtgatgagtttctttcaagacagagttttgccaatgatgctgcaaagacatccgtgaagtataaagggaactctggtgctatctatagtggacggccaagtatgagatctcttgctggtgaagaggagcaaagcttacattctcgtagcagcaatacaacaagcaggcctaccaatttaaaaagttcactcgatttaatcaagtttattcaattgcatcccaactcattatttgcccataaggcaaggtttttcattctttcattagcgctctgtcatagttgtttacccaaaagatgcaatatcaaggacgatggggaaacgaatgaagatcctatcgaatatcaatcttcatctccagacgagctagcattagttacagctgccagagatcttggatatatcgtactcaatagaaatggaaaaatattgaccattaaaagtttccccaatggttttgagaaggagcctttgttagaagactatgaaatcatggaaacaattgatttcaattcaaatagaaagagaatgtcagttttggtaaagactccaaatgagccgaatcgaatcttgctagtttgcaaaggtgctgataatgttattctagaaagacttcctaaccataaggatgcccgccaaaaaatggaggagtttaatatttccaccaaagagcgcaaggaagctgaagctgaagttgtattacaacaacgaagatccttagaaagaaatgcgacggatgatgatgtggcaagtaatagactaagatcatctctatcaagcatgccgaaaggaagtttatccttaaaagctatgaagaaaagtttttccaataaaagtcaccatggagaattccaagttaattccatcggtcagttcttggatacaatcaaaaaggctgatgaagaaatagatgatgttattctccatagtagaaagtctgtgcaaaaacatcaacagaaaagatatggtgacattaagtcaattccctacgctggacctcaacaagcaataccgtgggagaatagctgctcgtcacacgatcaaaatatgtgggattacattggatcagatgaattgattagcaatgaaggatatttattggaaaggaccttgcaagcaattgatgaattttctactgaaggtctcagaacgttgttatacggctacaaatggatcgactcgtcagattatatggaatgggaaatgcgctatcgtacggctaaaacctcgctcactgatcgtagagccaaagtagaaaaagtgggtgaagaaattgaggataatttagaattgattggtgcaaccgccattgaagatcgattacaagatggtgtggcagaatccatcgagaagattagaagagcaggtattaaaatgtggatgttaacaggagacaaaagagagactgctatcaatattggatattcatgtaaattgatctacgattattctaccgttgttattttgactgaaaatgatgaaaatataatttccaaaatgaatgcagtgtctcaagagattgactccggtaacatcgcacactgtgtactagtcataaatggtgctacattggccatctttgagagcaatccaattctcttatcagtttttgtcgaactttgtacgaagactgattctgtgatatgctgtagggcatcaccttctcagaaggcactgatggtgactaacattagaaacattaataaagatcaggttactttagccattggtgatggtgccaacgatattgctatgattcaatctgcggatattggtgttgggattgcaggtaaagagggtcttcaagcctcaagatcatctgattactcaatcgctcaattcaggtttttgataaaaatgctatttgtacatgggcgctacaactacattcgtacctccaaatttgtgctctgtactttttacaaagaacttactttttacatgacccaaatgattttccagaggtacacaatgttttcaggctcttccatgtatgaatcatgggctctttccatgtacaacactttattcacttcactccccgttctatgcattggaatgttcgaaaaggacttgaagccaatgactttgttagcagttcccgaactttatactgctggccgattagataaagctttcaatttaccaattttttgtcaatggataatactagggaccttaaattcgctgcttatcactttcttaaatgtcacagcatggggtgaaagtgcccttaaagacaataccctttatccattaggtgttgtaaattacacttctattgtaattttggtaaatttaaaatgccaattcgttgagactcatgaccgtaactggttagcatttgcgtcggtggcaatctccataataggttggtttgtctggtgctgtatattaccactggtctacaccgatggctccatctacgatgtttcgactgggctttatcatcattttggtagggacattactttctggtgtgcagttcttgtattagctgcttctagtgtcatggttgatgtcatttacaagactgttaaagtaatgctttggcccaccgatactgatatattcaagcacttggaacaaaaggacgaaattcgaaagaaattggagtttggtgcatataacgaaatgaaacaaggttggacttgggagcgtgatccaagtactttatcggtttacaaggataaagtattcccatcttcaagatcccgagctaattcgcagcagtcttcaaataaagaaggctcctcgcataaaaataagcataataataattctgatactttggtatcagagactactcacaccctagatctcaattacgatgataagaggtacgaaatgttacccagtggtaagttgattaaaaggcaagaattggaagaagaacagaaaaccaaccatctcttgcccaagaaattgagatttaatatgaagaacactgaaagtaatgaaaacattagagccatcgttgaacaacgcatgcatgatctggaataatgtttctcttacaaaaaaaaaacaccgggacgataataaaactactataatacagcaaccttcgtaaatatataaagtatattcttttgcatcagaaaaaaggaattaaggcaaattcgcttcctgaagtgaattagtcgtgaacctttattatgattattactttaactcttatcaaaatagtaatatacattgacattcagccgaacaaaaacctctctattatgggcactaagaacagaatcaataagggcaataaaacctttatgctctggtatagatcttgctcctgttcggcttcaaactgttgccgttgatgttgcctttgtcttgtctgagctcctctaggaccacttgtatatactctgaacccgtcaggccctgcaaatgtaaaagtacttccaccaccatccataaatggacttcccccaaatggactgcccccaaatggtccaccaaaaggacttccaccaaagggacttccaccaaagggaccaccgaatgcgccaccaccaccaccaccacgcatattgaataggatatcgaataaatcttcactaggctctctacgacgacggaaaaacatgttctcaaatcctgtatcaccattaaatgctgatgaagctgcactggggacacttctgtcatcggggtccctacctaacctgtcgtacagtgacctcttttcactatcacctagaacttcgaaagctctattaatcagtttgaaggcttcacttgctcttggatgtggatttttgtcaggatgtaatctaatggctagtttcctatatgatttcttaatctcattatcatttgctgttctttcgactttcaatatttcgtagaattggtgcttatccttcgaaagcacttcaagtgctatttgttcctgctcacttgtgtaagtttccatgttctctcaagagctgcaactgacgattttgagaaatggatatctggtcgttatctaggcaatatatggctttcttaatactagaaacttttcaacatcaacttagtcgtaagtaggcgaaaaaacctttggaagaaacaaccttgttggaataatgacagtgaatttcaatatcggtagaaataaatctaaaaaatcgggaaagtgctgcaaataatccgtcaaaattatgtggaatttttcatttcataatattgagtttgaatagggacattgattggatattcgagtagataggatgattttaagtttggagcgctagaaagtttctatagtgctacaataccctttgtagaacatgaaatcttgtggaatatatatttgtatatattctttacgacttccatcgcaattgtgaatgatcagaagcctctttcttgtgctgctactgtgtgcccatttaatgacacactgacgttttaatggtctgcaagataaaatttctacgacataattctgtaattcatagaatttcatccaaatttcacactgtttcgagcaattgatttcttgagccttatgtcttgcaataccccaagcgttgccctctggtgtctacattcgttgatagaagattctgtccaatacatatgctactcagactgagaaaaaggtaggcaagaataggtgtcccatattattggacctgtaggatcgataccagcactttgcaaatccgttggaatggatcctttatccaagctttagaggtcatttgacccttcgtgttaatacgcgttagctagttcatcatcgcatcgcatctcaaaggattacttatagaactgcgagacactactctaaaagcctgtaaaagcctaaaagcttccatctcatctcaatatggtggctgatcttaagagacctggtgaagaagaagagtacggctctgaaaagaagcttaggttacagtcctttgatcatggtgtcggtagtgaacctgtttcccatctagagattgttcctagtgattcctatgctaagcataagagtaaagggtttaaggctgatgaatctgatataagaggttcccaacaggcatccctttttgaagagcagttgtctttgatggatcataaggaagcagaagtaggagagcataaagagaagtatggcagagacccactgcctaaagattttaatccagagacacatgaaatctcattccaacaactagaggcagagcaaagtactctaccgttctcgaaagatgaaggtacttctactattgtaaggttttttggtgttacaaaggacggtcattccatactctgtaatgttactggattcaaacactacttgtacgttccagtgccatcagcaccggaggctcaagatcctaacgaagtggcgtcatttactaaatatttaaatgagaattttgaaaacagcgtggatcgtatcgatatagtgtcaaaacaatcgatatgggggtacgaaggtgagagcatgttaccgttttatcaggtcttcgtcactaatcccaacactgtgaataagatgcgtacagcttttgaaaaagggtatttgagtcataaatcttggttttctgcaggtacaacgacttatgataatattgcatttacactgaggatgatgatcgattgtgggatttctggtatgtcgtggattactttaccaaaaggcgaatatcagttagttcctgagcacgaaagagtctctacatgtcaattggaagtcactatcaattacagaaaattagtttcacatccagctgagaacgaatggtcacaggcgagccctctaagaattttatcatttgatatagaatgttctggtagaccaggtatctttcctgagcctgaaacagatcctgtaattcaaatagcgaatgtgatgagtgttgcaggtgccaaaaaaccatttatacgtaatgtgttcacagtggatacttgttcgccaattacaggatcacaaatctattcccatgctacagaggaagagatgttgaagcattggcgtgattttgtggttgctgccgatccagatatcatcattggttacaacacttcgaatttcgatttcccatacctaattaatagagctaaggcgctaaaagtggaaagtttcccgtattttggtcgtcttttcaacgttaaacaggaaattactagctccgttttttcctccaaagcatacggtactaaagaatccaaaaatattaatatcgatggtcgtttacaactcgatttactgcaatttattcaacgtgaatataaattaaggtcctatactttgaatgctgtgtctgcacatttcttgggtgaacaaaaggaggacgttcatcatagtattattacttcattacagaaaggtgatagtgaaacaagaagaaggttggcggtatactgtttaaaagatgcatatttgcccctgagattgatggaaaaattgatggctttagttaattatacagagatggctcgtgtgacaggtgttccattttcctacttgttgagtcgtggtcaacagattaaagttatttctcaattgttccgtaagtgtttgcaaatcgatactgtaattcccaacatgcaatcacaggcatcagacgaacagtacgagggtgccactgtcattgaacctattcgtggatattatgatatacccattgcaacattggatttcagctctttgtatcccagtatcatgatggctcacaatctgtgttatacaactttaacgagtaaatctacagttgagaaatttaatatgaaattggatgaggactacattatgacccccaatggtgattattttgtaacttctaaagtcaggcgtggtattctaccaactatcttagaagaactaattggtgccagaaagcgcgctaagaaggatttaaagaatgaaacagaaccgtttaggaaagatgtgttaaatggtagacaattggcattgaaggtttcggcaaactcggtttatggtttcactggtgctactgtaggtaaattgccctgcttagccatttcatcttctgtgacatcttttggtcgtaacatgattatgttgaccaagcaggcggtagaggagaagtattccatcaagaatgggttcaagcatgattcccttgtggtttatggtgatactgattccgtcatggtgaagtttggtactacggatttgaaagaagcgatgaaacttggtgcagaggcagcagcttatgtttctacattgtttaaacatccaattaacttggaatttgaaaaagcatatttcccatatcttttgattaacaagaagaggtacgctgggttgttttggacaaatcctgataagtatgataagatagatcagaagggtctggcttctgtccgtcgtgattcctgtcctctggtttctattgtgatgaataaagtgttgaagaaaattctaattgaaagaaatgttgagggggcattaggttttgttaaggaaatcatagacgatatcttacacaacaaagctgacatttcgaagttgatcatttcaaagacgctggcgcctaactatactaatcctcaaccacatgctgtcttgactgaacgtatgaaaaaaagggacggtgtggggccaaacgttggtgaccgtgttgactacgtcgtgatagcaggtaatgataaattgtacaatagagcagaggatccattgtacgtgttagaacataacatgcaaatcgattccagatattatctgacgaatcaattacaaaatccaatcatcagtattgtggcccccattttaggtgaaaaacaggctaatgccatgtttgtcgtcaaatcaatcaagattaatacaggtaatatgaaaggaggattaatggggttcgtgaaaaaagtcgactcttgtaagaattgcaagggaccattaaagaaaggggagggacctttgtgtagtaattgtcaagccaaatctggagaattatacattaaagcgctttacaacgtcagagacttagaggaaaaatttggccgtctttggacccaatgtcaaagatgtgctggcagtttgcataatgaagtgctctgctccaataaaaattgtgacatcttctatatgagagtgaagatgaagaaggagctacaagagaatattgaaaacttgagtaaatggtaaaaaaaataataaaataataattaggcattcatttataatattgtatattaattttacttcttttcatgataagcaacgattagaattaatggaggtattaaagttagatttttgataattctgagtaggtttttggtattttctcttggctaatctgtaagcgttctggttccatgggtattgtttcataatcagcgtttctaaaccaaggatggttcatagtttcgactacactaaatctttcagatgcatttaccaccaataagttcgagatcaagtgtaacacggaatcatcgatttcatcccagtagggggaataaaatgcaaacttaccttgtaagatctgttctctcatggaaggtggtcctaatgaatcgctaaaaggtggaaacccacataaacaaacataaagcagaacacctgcgctccacatgtcaaccttggaactgtaatcagattttaatagaacttccggtgccacgtacgaaggtgtcccacataaggtattagtgaattggatctctccggtaaatttagctaatccaaagtcagcaattttaacttggacatcaatttcatcttgatcccatggtcctaactgcatttcattgggactctgtcgcctagtgatgtttaaaaggatattctctggtttgatatctctatggataatattttgtgagtgtaaatgcttgattccttctaatatctgtttgaaaagtgcctgtgtttcgttttgtctcaagcagactttcttaacaatcctatcaaataattcaccatcgtttatcttttcaagtaccaaatacttctgaatttgggatttactcacgggttctacaaaactatccaacatcttcacaatattggggtgatgcacccgcattaaaatgttcgtttcttctctaaactggttactcttcttttgatcgtcattttgttgaggatggaaaattttgaccgctaccacttcaccagttttcttgttaatcccctctttgacagtagcataatgtccagaacctaattctctttctaataaatatttatcaaacacagatgtgggccttggctttaattttttccttagagaagtttgactgcttgaagctgccatttggggtttcttaaacacgccatcattattacttgagttagcattaccttcaatttcatcagaattctcagtgtatttgaataaaaatgatgtactcttaccaaacactattctatctccattttttaaaaggtaatcccgctttattaacctattaccattgataaaggtgccatttctgctcttgtccacaatattaattaatttccttctctctctgtcgagatcaacttgaatggtatagagctgacagtgtatagttgaaatatccacttctttcagtactacatcacagtgccggcttctaccaacggttaccacagcattacccatgagatcaatactctgctctttgcctgggatcaaactaatcaatttagcaattacctggtctgaattaccagcttgtatcgtctgatgtctcttggaagactcaacattttcgttactattttcctattaatgatatgttagttactctgacatataatagaatcgagtggggttcaataaaaactaggctaatagggatagtacatactcttttcactgacatttaggaatgataatgacagttcctttgagtatctgtcttgtgaaggttcatcaacagatctttatgttgatcatctcttagaacattagtagtctccgatccgtatcgcgtagctaagctgatcagtaaagatcgcgcaccaaagtaaaattaaacagcttaaacgaattttatttatgttctatgtcatgtaacatctcagtagaatcactgtataaggagagcacacttaagatatttcttaattgtttaagaccccttgtgggtggatcccagtcttgataactctcccataactgttgtaatcttgctaaggcctcagaattatcctttctaaatgacgttgggtttgactgcgctggtttccagaaccaacgatcgagtgatatcacgaaaaaaaggtttggtaggtgcatttgacttggtaaattgcgtaacttcatgtagtcagacaaacactcgtgaaatttccaaaccaaatcatactgatttaccgtgtttaaaatgctctgtggggttgaatggtcatttaggagcactaggtgttttctgttgagtggagacctagttttcatggtattttcgatgaaagtcttgtaaacacagtcatcgtcgtagatctcacaatacagtgtcataatatcaggattcttgagattttgatagtgagagaacttcaaaaatttgtaaaccgtagatacttcctctggcaattcatctgggatttggtctgaagaattgagtattttccatctggcatccatctcttgggtccatatttttaattcttgttgcgtagcttttcttaaagttggagatatcgtattctcattaaaagatctggagatgaagaaaggactaataagtttcaaaatgggtacgaatttcgtattacccaaattcaatgctaataaaatgttacctattagcgatatttcgaatctacggttctttggcaccgagacgttattttcatattctggagtcctgatgttaacatctggaatgcccaattcttctggatttctagtatccaaccctagggacctcccatcacaccataaatgcctaaagattttggggtgaacgtaatcgatggctaatttttgagacacagtcataaaattatcaaaaagtttaccaaacaaattaagtctaaatgtaccccaattggtgagtaaccaattcaaatccttttgcaccaatctagattcgtctgagtttaatttacgataacttgttagtttactcaaagtctctcgttctactttactggcaccctgaaacaattgcttctctctattttgttgaattttgtgataatcctgctcactgctattacttaaatcgacactgtgatcccaaaatctgtagccttgtaaggaggattcaatagccaaaatccccacaggaatcgtaggacggaattggaaagattcgtggttctgtagaatatatttggttaaagagatcgccaacggtactgcatggtaaacactttccacaaatatggcatctgcatcgtgcaaaatatgtgtccaatttttcaatagctcaatgcattcttggaatacaattgttaaatccttgctatctagtggacattcaaacgaaagagattcaatttttgaaggcatttcacgctgcaatgaaagtgctaatttggtagccaagtaatgagctgatctttgatcgcctagtgtaagctttttgtatttctcaggtaaattccccactagcgatatgatgacgacctttctttcccttaggagaccctctgtaatcttctttaaatagaggtgcttttcgttggggaaattgtagtagttcttgacttctgttgcagccttactgagccaagattgttcatgcaaagtttgcgatggtgaatcagaaggtaagatcagagaattcttgatgtatacgtgataaccgcgacaaccatctgagattggataatgtggcaatggtaaaggacaatgtgctgagcctgtactataaacactaaccacaccaggtctatccccccaggtggaacattcagcagtaatatctgtcaagttttcataccaacaccaagtattatttcgtcgtacaatagtctccttggcttctacttccaaatattccacttgaggatcattcagttgagaatatcttgcatttgaatctattacaagtgcttcttgtctgttacgaacgaatggaattgatggcatcttggacattatactggaataccaaccagtgggctgttccttggcaacttcatttggcatctcactatcagcgctaccttgaaattctacatttctgccttcatcgtgaatggcctttgtatcgttatcgttattgttattatcattattattgttattattgttattaccactattattactattcgagcctgtacttggatttgcctctccgtttgtatcagaactacctctggaataccaccagctgacccatctacccctctggggtctggaatcatttaattcagacatgctccaatgggtttaaggtctattcaggactacctttttataaatattttaattgttcaatggttaaggttaagaagggatcttcttggcgaaatcgtttaagtttagacaggaattgatattgaaactaagaaatcgaagagaatggattcagcacttctcgaaagacttctgcaaagagataggatagaatctagatttcaagagctttttatagagcccaaacctggtcctaatacacaatctgatcgtgaactgacgagtaatgacactttgacaattacattagcaaggctacgaaaggagttgaaggggaaagaattacagattgctagcttacgagaagtgattaatgtgaagaataaagattctgagaagttaaacgatgagattatcagtttaaacattgaaaataacttgttacaaaaaaggtttggagagttggaagaagaacataacaaattggtgaaaaggtggctagataaagtacagcaggatgttgaaaaactgaatgcaaatttacagtgaaacgacgcttgtatgttttacaagtaaagctcatacttttagttaacatgaagcatttaataggtataaagagtacggaaaacaaataagcgtctatgtgagtatatcttggagctttttatgctccacggaaaggtacgtgataaaaccatatgtttgatcattggcttaagtttaaaacgaaaagtatcatggtcttaaagccgtacaactggaagtttgtaatggaagcgtccattgaacttcctagacccaggatacttttgttggcatgtcctcaaattgatatattttatgttggttgattcgaatttgaacaaatagtaatcatggtacttatgaagcaggaaatttaatcattttattcacgcttaggagctttccctacgagatccggggacgtctacgggtatctactttatatttcacagttatcgtagataccgtaatgcattggtagtaagaattgtagctaatcgacgataatgacgacgaacagaagagttagatccatcagaggatggatttatccgaacgaaataacaaaaaaagtagttctgtgaatcttacaggtattattgctcgtaattatataggtcaaaatttataattacaaaaggaatccctatttatgtggacctttgatatctttaccgcccattttagccatgtgacatcgagaagggtgattcgatttttaagagatgtaaatcattttcggagttgtcttgtctttgatttcttggcacattctttactgctactaggaaaaagtctaaacctttttctattatcttgagctactttaattattaggccatttctctctggtatcctaatatgggttggttctaaggtatcccttaatcatcttcaagaccgtaggagattttagtcatcttctaaaaagaagatagtattaggacttagtcaagccttatccagctcaggctaagggctcaagtttgatcttcaagggaaattgacataatgtcttgctgaaccagatctttgaataattatctcaacttagttagaaaataatacaagccttgaaattttcctgagcatggaacgtgtgctcgtggtgggaaccatactcatttcataatcgtcctcttcctcgattgcatttcttggaaaattttcaagagacgatgtgatgactgtcgttgatcgtactttgcggagctattagtggcgaggccaacgttcgattatggtaaataattaatatcgcttgccatttagtataggcggtgaaataatcaagatactatgatactaccatgctacatttgcctgtatatgaacataggctaacaaggtctgattactctcttctgtatgtgtcaattccatcgatcactgtatatcggccaggtcctactgatctgctttccgtcataggatcaaataaacttggtcaataaagcccacaatagcaactgatttaaccaacattggttgcttcactagctcagtcggaagagcgtcagtctcataatctgaaggtcgagagttcgaacctcccgtggagcatcaatttttttggattttgtcaaagtttatttgatcgcgcgctgatacaacgatccaaatcgttcaccaattctttttacaagctatattttttagaatagtgttaaaaatattttccactacatactaaatatcattttttgttttccaattcgtaaatgatcttgttatccattgcgggattgtattctttgtttaggaatcttgaaaatttcctcaaattctctagacctctaatttcaccagcacataatggcatctttaccacatggaaatcttcgtatagctcatcgatttgatccaagtatttcttttgcatcttccatcttgcttgacatcttttacagttatgttcttggtcatcatctgcaaacaacaattggttgacaataattgaatttacatccatatcataagagattaactcttggatcaatctttcagtttcataaagtgataaaaattcactgatacaaacacagacaaatgttgttaaatctggattggtgaactgatccttaatggtttcaacactttccttcaattggttcaatttagtactgatatccacattaccagcaccagcaagagaattcaacattggacccaaacgacctgtaatttcaccaaatttttccaaaagtttggacaaagtgtttggtagttgtaaaaatcttaaagtgtgacccgtaggagcagtatcaaagataacagtatcgtacctttcaccttcacctttttcttgattcttgatatgtttcatgacttccatgaaagaaagagcttcatcgataccggggatagatcctgttaattcagcaagtgcaccaccttgtaacaatccaccaagaccatcatcaccttgagcaccattttcattggcttgggaaactgccatatcattcatatctttcaatgcagctgatggatcaatctccatacatgacaaattgttcataccagtaactcttcttgcatccttgccaaacttctcaccaaatgcatcacttaggttgtgtgcaggatctgtggaaatcaataaaaattgcttgtgaggttggctttgagccatttgaatggcaatagaacatgaagacgtggtcttaccaacaccacctttaccaccaacaaagatccatttgtgagtggaagaattgatcaatgaatgtaagttgggttcgacgactagatccatgatattgatacggttgaactgagtcggttttcttttgttccttttatatgtaaaagattgttttcgatgttagttgtataaaacacgttgattagaagaacacttgagccagtacgaaatactacaaggcgtataaagtaaggtaaagaatcaacttaaagatcccatttagattcaattgtgatgtcagaagtgtcagcagacgagaagagagctaagcaattagaagaagcaaggaaaagggtcgaggaattgaagaagaagaacaagaagaaagggaagaagggaaagaagactgaagatgataacgattcatctcaggcagccacagcggatgaagcaacaccagaattggaaaaggaatcgagtccagcagcagcagtgactgaagaatctgtgaagcctactgaatcagacgaaaaggaacatgaagcaaccacaaagaagggacaatctcaaggggagaatcctaaggaggagaaacccactgagtctgaggaggaaaaacctgaagcatctaaagaggaccaacccagaggtgaggaatctaaggcccaagagaagtccacacaaccacccaaagatcaatcggaggacaaggaacccgaaacagcagagaaagtcacatctgaacaacaggacgtacaagatttgttccaaggtgatgaaggctctgacttcttagatacaatccaaaagcagaaggaagaaggtgagttgcaaactgtcaaatcccaattggaaaaggtcaccgctgatctgaagagattaaaattcgttaatatcgaacaagagaccacaattgatgaactaaatcaacaaattaatatcttgcagacccagttacaatcttctcaacaagaattggaaacaagcagagaagagttacaaaaattcaaacagactacatctacacctcctccattacaatttgctcctttcaatgtgcctccacaacaacagcagcaagcacaaccacatcaatatcaacagcagcaaaatccatcctttgtgtcacagccaacgcatatcgatcgtactgctctagataaatggcgtaattggaacattgacatgactacctggagaagtatcggatcaggtccaatagtagaattttgattatataattctcttttgtataatactagtaataatatttacatgattccaatgaattcactcatttcactctgcacagtacttcaccgtccaacttctttaagacagcttcgttaatatctatcacagattctttcgtccttaccatcattaactcacctggctgcaatggcttaatcaatctaacaggtactccagagcagagtttcttcatctcattatggctcaagtgtattctcaagttaggctttgacactaatcggcaagaacttaacacagatttagtgtctctgtattttaagccaacccaaagtcttctagtagaaatgttatctggagtcacatcctctgggatgtcatcaggacccttggtagaacctttttgtaacgatgagagaaatccatgtgtataaagattgtatgcgaattgtagatgcaatttggtgtagggaatcgaggtcaatgaagttctcacacgagaacaattttgaagatgggcacaggtattggccagtttgacgagtgacattattgggagggaccctgtggatttatattctttccttcgtgttaatgattaagttgtgcaactttttttcattttttcacatcatcaacatcatgttgaaaagtttcaagaactagtagtaatcgaaaaagactgtttaaaacttaaagggtagaggttgatgttgccattccggagaattttattaaggcgagggccattgactggacgtgctgctcttttctcgccagcttttaggacccttggaggtgtttccagggaatatgcaagtaaacccgcaaaacctgcagctagaaataatactggccctggatttgcaatgatattcgcattagctattatagggactgtaatattcaatgaaacagccaaaaatttggataaaaataagcccaggaatacttttactgaagaggaatatgagcatgttatgcaaggattgaaaagaagagttgctatgtttcctgatggtcagttggacgtgcaattttctttacaaaaggattcaactcaattgaagaaattattgggagactccaagctgtatatcgatcctggtcaagtagtggaaaattatagatctgacagagaagatccttatgaaccgctgttgaacgaagtttactccaagtatggaccagagtatttgaaatatttacctcagggactcttagtcagtctgttgggtagatacatgaaagctcattgcaggcaaggtgatcatgttgttattctagatttcccacattcgataaaggatgcgattaaatttgaaaatgaagtgtctagtgcttccaaattattggtccccaaggaatcattggattcagatgtttgtaaatattaccagactgtgcagaagagccaacagttataagagaacgccatttatacatacatatctacttgtaaatactacatttttgtactaccaaaggtagaaaaccccatagattgatgtatagcagagggaggattgctaggggcattgacattttgtgattttccaattctagtgccggtactagttgcttttggtttggatgcatgttgcttaacgaatcgactcactaaggtcttgtactccttactaaattcctctggaggaatatcatcattgtcccttttatctgccactagatcttcaccaaatatagcttcaaattttagttggtgagtcttgtggttaagatggtcaatgtactgtgcagtatctttatgggttaaatcgcataattcacagtaaaacccaaattgcttacctcttttataggagctaattccagtggccagcacttttttgttcaagtcatgcatagactgccttacaagcctattatgatcggtatatttgttcttgagctgttgtaatttagcatcacttaatgaactcttcaacgtttcttcatggcttaaaggttcttcttgagctaactgagcgtactcctctctatcccaggtccttcgaccaaaattggccatccttagtgttgaaaagttgagtcttataaacctagatttcttcaacacatcgattttgttttattcacttgtaatcgaactcatcatcgctcatgtcccataggttaaaggtattaccttatttaatcaaacatacccctaaagcaccaatattgtctcagaatctcattcaggtatatgcattcgacttggaccatactttgattcagcccattagcagttcgacgtttagcaagacagctgaagattggcaattcgtcaaatatggtaatagaaattcgatagatacgttacttcaactggttcgagatgaacctaattcattgatagtagttttctccaatcaaggtggtgtacttgcatccccgccggattccaagagctgcatcaaataccttaccaagatcgagctggtcttgaagcacattgcaacaatggcccaaggtgatcaactattaaatagactatggatatatgcttctcccaaagcaccagcaagaattgcagatcgcagcatgtttatcgatatgaggaagccggcgaccggtatgatgaaccagtttcagcaagatattggatcgctaccgatcgaattaaagtactactgtggtgacgctgccggcaggcccacggattttagtgattctgacgtgaagtttgcccacaatttacatactattttcaaattaccagaagatttattcattacttagtataacacgcttgccttttcgaatagctggtcgaccaccttgtctaattcgcccaccagttccaatgcagaatcgtaagtagcatcctggtgtggagtatcgtagatgtacaaccaacctttaccttggtccagaacaccaaagaaaactttatctaaaatcatttgtgacaatttaccttccacttgctttgcatctaagccgatcatcttggagatgtgagaaacttccacgcactcaaatggctcaatcaatttgcacaagttagattccagtaaagtgtcgtataacgcattgaaatgtgatcttatcaattcatcacccatcaattcctctttgtactgtcttagggcagcgttgaattgcaacagtgaccgactgttataggcctctgcaacggcactcattgcatcgatgtcacgagattgataagtctccttggtgtacttggcgttcagtatattgttcacatcactgataaggtttaacatgatcttggataacaacatatatttgagaacacggcatgcttttccatatgaattgtgtgtagacaaatggtggaaattttcaaaactttcgaagaagtaagagtatgctgttttataatctctatcttcacagtggagtataccactcattaaatccaattctgccacagtggcggttggacaatagatagaattggctgcagtacgagatgcggtcgatgcaccctttgcctttgttaaatttctcaatttatggtacacttttgcttctaaaagatgtacgtccactaacgaaggtttatcgtccaatttcttaaattccttcaaaagagagttgatcaaatctagagaatctttatactgagtcttttgatagtatagggtagccaatttaatggaaagagaatgctttaaaaattgtcttttctcctttttggcaaattcgatactcttttgacagacatatatttgatcatctaatgaatctgggacttctccaaatttttctatcaaagtcttcaatactttagcagtctttgatttggcgaactgtaacatatactcggtggaatttgggataaaatttcttaatttagtcttatcatgggtagtagcataaagggatcccaattctagaagacatgcttcctgttcatttttacgagaatctgttacactagattcatccttgtttaaaagattcaaatagatagtttctgcttcagcatattgtttagattgaaccagttgccttgcctgttctaaggacatgttcagggtgcttcaattggtatgataaaaatctttaaaattcaaaccactctgctaataagtgaaagccttataactgaatgagcaaccaatcgacaacgatgaggatgatggcgatattgcaatggtaactactattaaagtgattacttttgccaccatacctttattttaattgaatttgaaccttttgaaaaaaacatgttcgtatgacgcgatgtattttacggtcacgtgcaagaactataatttcaagagtttggctgatatccaaggtatactatcgttgtagatgctggatgaccttctttcaatcggattctgatttctcagtgattttctcctccattttccagcgttctacactaattttagcataccttgccaaaatcagcatattttcataattaaaaggcagcgctgatatcagaagcttacaattagtctattcccatgcttcattatactcataattcggcctcttctgtcagatctaaccactttatcttacacccaaacacacccataagtcacatgcgtttcacatgatccgtagtacgtgataactagtatttgttaccctacttgtgacgttggaagtgataccgatataacgccaaatcttgtttttttgtttttctttacgtgtcacggtagatttttttttcgtgatgaaaaagatatcataatataaaaattaatttaaacacgtagaagaaagttctaaacatatttagtgataaaaagatccttaacaaggttcaaggttcaatcggttatcctttacactttagaaaggctcttcctaacgttgttctgcttccagcgtgctgacctcctgcaattgtgtttctttcttgcgaaggttagaaccttttgtttcaagcgaataacaaatatcgacgatgtcagctcttaatgagaaacgattaaagtcggaagaattgaatcaagatcctgtcgtggatttagacatcaaacaaggcccatctagaccttatgtttcttctgaacctccagaaaaattaagcaagttgcgtaccgttcacaccaaaaatgaaagattgttggttgctaccctagctattatcaccggtgcagttagactttacaatttgtcgtggccaaatagtgtcatctttgatgaagtgcattttggtaaatttgcatcttattacattagaaacaactttttcatggatgtgcatccacctttggccaagatgatgtttgcatggattgcatcattggttggttttgaaggtgatttcgatttcgataccattggtaaagctatcccagcaaacgctccctatgttttgatgagatctttggctgctacttccggtgctcttacagtgattatgctttatttcactttgagagcctcgggtgttagagtttggattgcatttgcaagtgcattgtgctttgcactcgaaaattcttatgtgactatttcccgttacattttgttggatgcgccattgattttcttcatctctgcttctgtctactgcttcaagcgttatgaattgtacccaagcggaacttgtcaatcgttgaaatatttagtggctaccggtatttgtctaggtttggcatcttctgccaaatgggttggtttattcacagtagcatgggttggtgttttgtgtctatggagactttggttcttcattggtgatctatccaaaccagtttgttctactttcaaaattgctgccgccaagggttctatccttttaggtatcccagtcctgctttacactttcttcttctacctacatttccagactttggataaggatggtgaaggcgctggttttttctctccagaatttagaacatctttgaaaggtaacactattccacaaaatgtcatggcagaagtgggtactggctccataatcactcttcgccatacaggtaccatgggtggctacttacactcccatcctcacgatttcccagccggatctcaacaacaacaaatcactttgtatcctcatttggatgctaacaacgaatggtacgtgatgctttacgatcaaccaaacagcacagtgacatcttttgaaaacttgaccgatggtactaaaattagactattgcatccattgacctcccgtagattacactctcatgaccataagccacccgtctctgagaatagtgattggcagaaggaagtctcctgttatggtttcgaaggttttgacggtgatgctaacgacgattgggtcattgaaatcgataaggaagcatctgcccctggtcctgctcaagaacgtgttagggctttggaaactaaattccgtttaagacatgccatgatgaactgctatttgttctctcatgaaattaaattgccaaaatgggggtacgatcaacaggaagttacctgtgcttactctggtttgccatctttgaccctatgggctgtggaacaaagttataatgaattcttaccggaagacactgaaataatctcttacaaaccatcttcattctggcaaaagttagtcgagtaccatgaaaagatgtggcacatcaataacaatttggttgattctcatgtttacgaatctatgccaagttcttggccattcctaatgcgtggtattggttactggtctcaacattacagacatgtctacctattaggtaatgccatcctatggtggtctgtgactgcctttatcttcatctttggtctagtggctgttgctgaattggtcgcttggcaattgggtaagcctatcttgcaagacagccgtttggtcaatttccatattcaagtgattcagtacttgttgggttacgccatccatttggcaccatctttcttgatgcaacgtcaaatgtttttgcatcactacttgcctgcttactattttggtattttggcgttcggccatgctttggacattttggtcacttacgtcttcagaagacaaagaaccgttggttacattatcgttggtgcctttgtcctctcatgcctatatttcttcaagaactactctccaatcatttatggtttgccatggactaaacaactttgtgaaaaatcacaatggctatccggatgggattactcttgtgctaattatttgaacacttatgaggagtattccacagtagacctcaatgagggtttgataccagaagctaccgcagctctctaatgaataaaattatgtagggtaaagaaagatggatgaatgcccgctgaatcttctcggtatgcacgagaaatccccacgtatatgaatgtatatatccaaagaacgtattttcctttaaataaatatatcctcatttcttatctatacctctatgataataatatacaagcatttacatgcagagcatcattataacagaaattaagcgtccaactggcgatcattgctctgaagggtattttcatcctcttccaaaagatgttgagctcttgagtcatctaaaggatccaacttcttgtgtcttgccttccaataagtgactgcaataagtgacaaagtgagtaatacaattagggagcagcaaatttgagtaacgtggaaagtgtgtttgtagcaatctataccctttttgcagacagtttcgctaggatctgtatgtttgtctaaatctttgcccaaaatagcggcaaaaatcttgatactaggcaatccaccactggtgctaatcccccaaatagtactgaatgcggcagtgccaaaactatcagcaattatagcaggataagtaccaaacaaaacaccaaaggcaaatccaaagattgcagagcaaaatgaaatgtttgttaggctttgtggtaagtttgtagccgtcgacactgcagcgccgggaatctggtgcagcatttgacctgacccccagaacattaaaaatcctgctaatacaatattccacattctttgagcatctagctttttaactaatagatcagatataggacctgacgaaaggcggcctgcaaatgaaagtatggagataatggaaacttgaattgattggatcctctcgggattcaaattgtatcgacctgctggtaaggaattgacttgagtctgcacgataaatccaacacagtagatgtacatttggccaagaccttgtaacgtggccaaaataatgtaataagtgaggaatcttggtgttgttatagtgtgcaagacgtaattttcggtccattttttaggctttgttggggccgctgtcgttggcgtggtatccaatctcacaggtggttgtgcactcagagttcccctagcgtccgggccatcagagtcattacgcttgaaactatctcttctggtattattcaaaggcaaggtatccattcgacgcgattgattagtagcagaatagcttaatcctggtctcgaatacgaaggtgtaggtatacgtggactttcaggtgttgcacccgtattggggacattaggtgccggtgaacctgcaggtaaatcacgctctctaccccacccccagaagggtaacgatccgcttaattctgttgaccatacatatgaatctgtaccttgggtagaccacattgattgcgaagatgatgcggtagatgaccctgatgcaagggacgcctggtcctgcttgttaccagcagtggctgcgggaaaatctggttgattagcaactgaaataggttgactgcgatctaatgcagtatctctaacgccacttgattgtctactgtgagaacgctgtgttttagggtgaaccaatatttcaagtgtcagacagccagtgaagattgcaagtgagcagaccaaagtgagaaatttgaaaactttacccatatcatcaccaaataattcagaacatagagatgagtacatcataccagctagggcatacagagatacggggaatgcaccagcagtacctctgtgatgtggaaaattggttgtacaacacttgactgatgcataaaacccagagatggatccataaccaattaggcaaagtgccgtggagattaacagaacgctagacaattgggtctgataacagtagtctaaagtagcgtatccaataaatgtacacagagtaccaatgagacacgatagagctggatttttatctataaccattcctgcaatgaaccctaatagagaagatcccaaatttagcgatagcgacaaggtactcactttggagaccggaatatggcattgtgctaataattgcggagcataaaaagaataaacatagggcgtaccagcgccaatagctacaatattgctgccaatgaatgttttaatcaatcgagaccgttcagggcgagccatatttttgtacttttccctcttccaccagttcttgttgtttatacctcgtacctgcaagatgtgaaaataccctttccaaccactggctaccctgagaagaattcacctatttcgacaactctggattttaacaaaatgtcaacgtatttcccagcagtcaaaacgtcttggacttactatttgatcacaatgtttgagtcacttctacgagtaagatatctagtagcttaccagcttaaaggattcgagttcttatgttgtcaatttaaaaataatgtggagatcggacaccctggttattttcggacagttcatgtgaccttttttatactgtggtattattttttcttgtgatcattatcaacaattaaaaggtctcttggcccagttggttaaggcaccgtgctaataacgcggggatcagcggttcgaacccgctagagaccatttctttttgttttttgaacatacgttaattaatagcatgtatggatctgataggcaccttcaaaggtttctgacctacattagccgctaaagagtaaattagcggtatatatacctatattagcacgtggatttcacgtgctctctaaagattttttccactatgtagaaaaataatttggatccaaccaacaatcatgcacaagatgagcaattacttggaaacagattcaccaaacagttcaataagttgaccgtccctattcctgtatctagctggtctaccaattgttggaatggtcgatggaggacacttggaaaacgaggaattcctcgtgaaggtaccacaattcttccacatagcgaatgaaaagcatataacagtacgtctatcaacaaagagattggttaagcatgatagtgtagagggaaatgcagaatttgacgcagttaataggccgcactatgatgtatcccaaaaatctcaaaatttaaaaattgatgataactccaaagatgtataccagttgctagtgagaatgtcatacggatctaaggcacaaaagactaaatgctccacagttgttgactctaataatttagataaattttggcaagattattcaaacgctgttaaaaatggtatgagcggattgatcaaaaagaagaagaagaagagtaaggcaaagaatggtaaaacccataagaaataagttatcttataatgtaaccgtaagtaatttgtacgtactattatgtcaatggctccatgactatgtttccggatggatagattgcaggttcatcaccaattgtagtacctggatccaattccttgcgcggcaccggcgttagtagtaaaaaacgatagtgatgttcgtatcctagtggtggcgaattgttaacttctgcactgtccaatagaccttccatggataattccacataagcatagatctcatcaatggttaaattagaatcaaattttctaactattctagcgccaccatctgttctgatggcaatacgacatgcggaccctcctgtactcgtcggctctggtcgcagtatggatttacgccataggagccattgcttacgcaatagctcttgtctttcttgttctaatgctgcttgtctttgtgcatttctttggcgtgcaagttcttgatctcttctcaacgattcactgtaacgagagtcttgttgttcccttattagtctctgtagcgctaagttttgcctctgttgacgaatttgtactaatttgttatgacccttggtcaatacgttctctaaagcgttcgtaccatacttatccaaattaccttccaatctaccaatgacttcaatcttcttttctgcctttagacataaaacccccaagaagggaaattgccttacttttagagcattggcagcttgtaacccttctgagactgtgacttcgctaaaccatagtaacacttggtattttttgattaaagttgcgaacttttcagaacatagtagctcattgacatattgcatgctgttatccaacaaagaatcatgtaaataaattatggcaaatttacattgctctgaacaagcattaagcagatccgcgtatccaccttgtacaatatctggagccaaactaccatgttctaaactgtaaagtgattcaaatgtatatgtcggtgtgttcacatcttgaacactgggatttaaagtcctttgagattcgtgatccaacgtttctaacagattgttcaattgagattttggatccgataacctgctgttcttcttcttgtaaaatccacttatattacaaaggggtttcaataaagatagtatgactattgtccaaaccataatgtagtaaagtaatacaaatgggatcctgactagtgtaataagtatagcttttctattccatctattgcgacgactgctatgaccactgctagtatcttccacatttccctccattcttgagtcatgaatagtcgttgtctcctctgggaaacttccagggattggtgtaaaaggtggatcgccaccatgcatggctcttctcaataagtccatcgtccttcaaaccctttttagatggccaaattgaatgaatatggcttggttctggtgcgctttccagtacatattcctataaaggtgtcttgttaaatgtatgtgtctactgcgcgatggcatgttaatccataatgagatggaaaggctgaacactctacattataatcacaagaattagatccggataattcttagatacgataaagaagtatgcttatttgaaatgcttgtagaatgtttctaaatccctactgggtaggccgtaaacggggtttatagactccagtcctgaattatcatcagggtttatggcagaagagttgatctttaaggcgttgggtacacttggatccaattggaaagtgttttcagtaatggcaacacccagtagtccgtaattcgtatgatagaaatctggcttagttccgggtttatctctgatgcctggacgagtagtcatttggcaacattttaaaatatactccttgagtccagctttatcgatacaattaccatggccataagcttctagaatagctgcggtcccagcgacccagaaactgtagcagacatctaccaatttgttactccgacctgaaagacctttctcatcattatattgtctttgactacaccaatctgccaatttttccacattgatcgtatctaaagctcccaaaatagctaaactagctactgcacagaaagtgtatccaccgtgtgcttcatcttcatgaggtacaccaccgaatccaccttcgtaattttgacaatgaaccaaaaattctactacattctcacacagctcttgtgttagtaaaccaagtgtagaggctacacttatggcacagtatacacctctggtatcgtattctccgaccctaaagcaggtttgaaatccgccgtcttctctcttcagtgtcaataaccaattataaatggaactcctgtttattttatcccaacaaccatcggtattatcacagatcgctaatgcattaacaatggcataagtaccagcaagatgcggcagttgtcccataccaccaccaaagggtcccccatgaggattaattctaaacaccttctcctggatacgacgttgagtctctctctctaaccaactcggattcataactcgaagaccattagctacccaataaagtagccaaggtgctgatgcatccagtgcaaccattcctggcggcaattggtgggagaatggagaatccaaaaactttttatggaactccttatctaatgtgttcaaatcatctctttctaacagtattctacattcatgaatcagcttatcacgggcctctgtagtctcagtttccatttctttgaccatagctacaatggattgttctgattctgatgatgattcctcctcagaggggacaactctctcaataggtgaccgttttctacccaataacttggcagcagggttcttagaaccgttatcttggcttgtcataatgccagaactttatataatgagcttaagatgtctttgtgaggctcactctggttgttccatcatccaggtcgcttgttaaggtaacatattttttcatattggatccttataatcaaaaatctcataccaactataacattttaagaggttttagaatgcggtatatgaattccaatggatgattggaggctcttggacgaattacggcatttgatttacttaggtaatggtcttcaagggcgtgaggaggatctcaataggttgatttcggtggcatctaagagtaatgatatggaactgataaagtcggttttaatcctaaaagaagactctgacaatttaagtcccaaacaaaaattgctctggttgacttctaaacttcgtgatagactttatcccccactggctgttgatatagcgggtcccttaccttggaacaatgatttaagtctctcgaatacaaatgttcactactgttatgaaagacatttgaaaggtgacttagaagttttgggtctttcacagtgtcgagatttagaagattgctcctttgtagcttctttgataagcataaagaatcaaagggttcctttcccaagaattaaacaagtcaatgatcatctgtaccacgtcaatttgcattttaacggttgtgaccgacggcttgtgtctgtggatacttcgaaagtgcccacaaatgatgaaggctaccaattgagtctcctaagtgacaagataatggataaaattgtggagatggcttacctacaggttaaatctggctcttatgctacgactggatcaaatactgcggtggatacatttttgttaactggttacgttccagaagtgaaatctacagacaatatctcttcaattcaagaggccgttagctgtttcaaaactggtagttgtttgttagcgctaggaactggtcagcaagcaaccaaccttgatgcgcctcttataagaaaccacgattatccagtgattgatgtagatctacgtcagggaatagcagttttgcaggatccccttgatccatatctacatctacaaacagctttagaggatttcattgaaaattacgagcagttatacgtcaattggtgtacagacaagctgtttgcatttgagaaaactctagagtttttttacaattttgcaaaatgtgataaatttaatactgcaatgaataagcaattatttcttctggaaaatggttcagactctgagcaagacgtctggttactattagagtctcacttgcaatcggagaaatccatagcctatctacaggaattacccagagatgttttatcttcggcgggggcgcctcatgaaggagcctgtgacatcgggttacaacttttaaaattgaaattgagccctagatcgaccaaaagattcttttgtcattcttctaaaagcaatgcatttacaatccacctttattcaaattcttcttcagtaaacatagtcagatggagcgcggacaaatgtaccaagattttagaatgtaaagccaataatttagaacaatgctacatgggatcgccattctactacaaaaatcccactttccaattagaaattgttcattctgaggctagacagtttcccctaaacttgcagctactctcggaaaactgtcaagatatggtgaatcttcaattataccatctgaaagaccattctttgcaaaagcccatttttgcagatcccaactatactcagcagaggtacgacaagtctttcgttctactctcgaccaatgttccttacaaattggtgtgctcttcttactccaacaaatcagagcactcttatagattacaagtatcaccaagtgatgatcaattattattgccccatattcagattaaacaaatttatatgcaatttggtggtctgccgttccaattggaaaggaaaataccttgtacaaagaacaaagtactaatcccgtttgctacatcgacaaatactacctgtttcatacgtgtggttcccccaacgttctcatcattgatgagaatgcgtttggctgtctgcgataaatgtggtaacccccttcgcagtgcacaattttcccaacctccagctccaggtggtatggtaattgatgactggaaatctacgggaccagctcaatatatcctagtaatcgattttgatggacctgaaacagatttgagttcatctcatttcactatgtgtatcggttcctctaagaaaatcatgatcgacggacgttattgttaaagggtcctcaaagctcatcaatctctaaaggtactacgacttcaccatcagtctaaagggaaaagtaattgaaaaaaaaaaggattgtcatttggagctagatttggatttggaggtgttcattttgtccatgtcactgcgtatttcgaaagacgtctctgtctctgtgaatacagctgatttgttgcccgaagatgatggattcgatagagttgatggtgataaccgtggttggtttagtgtatttctaggactcttcaacacacatccttctgattggaatatcgctttaaatgaggctatagagactattgattgggattctaagtctattacattggctcaacctttgggaaatttttttacttttgcattttatgtggtcagattacttcaattgagtttgattaagcccaatttgagtaggattaatgagaaaactgaccactttgatctttcgaaatctgagatgttgaagaaatatgagtatttgtaccatttcaccaatgataaaaatcaatccgttgggaacgtatactacaggtttttgggaaggttgggaaaatttttcgatatttgtattgtgcttctcacatttaccaatggtttcattacctataaatttttttgggggaattttaagatgtattgtctattttatttgaaaaagggacctcatctgaggaacgttactaaggcttctttacaaaaattgggacaggatgatgatgatggatctctatggtcctccctacggtatttttggaatggaactaaggataaagaggggagtactgatgatagggatgatgacgatggtgatatacattataaattattcaaatggacaccttcgcaattcataaccatgcttttcgtctcctttgcccctacggccgtcgtctttctattgtttacagaagtttcattccttactttgatcgcggtgatcgtccatcagtgggttcttcaccgtttagtaattgattgttacggcaacaggcttgtgcatgaatccgtcattgccagcgcaaatctagctgaagtagaagctaagtttgttaaacctcgaatgtctaaaaaggttcaagatgttgctatagactgcacaccccatggtgatggaatggttaaattttatcctgcattgactacaaacagatctcacattttccaaacacattctctaacaggagaattgataacagaaacctttaacccatcaaccaaagaatttgaggatttacagacagagggaactacacacaatgtgataaggacagcgccctatgctgctggggatttacttcacagggatccatattggtatcagagaaatatgatcatgagggatgtagcgcatcgtccttactttcacagcagagaagtaagcccgacgaggtaccatccttcgagaataagtccccgtcctggtcaatattcgccgttagtgtcatcgacatctggaatgtcgacaccgttaatgagacctgatagatctccattcctaaacacaaggccttctttaggagaacgggaagaattattccacagaggcaattctaggagtccattacgacaacccattgagaacttcaaatcgttggatcgatcttctgattctcaaagccccataaggaggcataatggggattcggatgcttaaatattagttttcaaagttctgtatagaaattaattagaacacaacatatagttaagagtaaattggacgggattacaattcgttccagccaaatagccaattattcaccttatgcaaaacactagattgtttccggttattctcctcctgttgtcgcatcttttgctcaagacttcttaaaaagtaatgattgtcagcggcgccgttatgaacaaacagagattttccatctttgatatcgagtcttcgcgtagggtgtgcgactttagaatgatctagtagattgttggcagtattcttcgttggtgaaagaccttttctatcttgcttaccattgacaaattgttgagggctagttacacttgatacatcttcaccattttcaaatacatcaggaccattgtcagctaaagttgagggagctacggaaaagttcaaattgccaatatcatcttccttttcaatcttacaagaagccaattgttccactgctcttttgttgtaaggaacgcaaccaattagagatcccccgtaaacaaggccgttctcttctaaagcacgcaaagctgaaggcggcgaatcataagttagttttacccaaccgtcaccagtaaaaattggatattttctacctggttttgaaccgtgaagtcttagagttgcagtatttataccagatgaacttcttagcacttcaaaatcttctagaatgtagccaaatttagagaaatgagtaattatcaaatttgaaatcgattctggatatccaaatacaataactgcactttcattatgagtttgtcctaaattttcaccaacatcattaccaccactctcaggtctgatttgagtgttggttttcgcaaccgaacctttatcaaatgcattgaattcagtaccagtgctgataccttttttaatgctagatgatgaagactgagatgcaacttgagtgtcattgggtaaaagcgaattagaattcaattgtggtaaagtagtaccgaattcatcttccctttgccaatcgtaaagcgatatacttggtggagcctcattagaatctattagaatgccagtattcttttcaacgttagttgtaggtttggcaatttgtgaagattgaaatccaccagcatttctctttgtaccaaatgcaatactgttaaacccagagcgtactgtagatgaaccactgtcgttatctgcttgtgaagaatctgcagatggggatctcttggtggttctcttaactatcgattgtggaatagcccttttctttggattgttgaaccattctggttctctttgggtctgtaatccgtttgtagagctaccacttacacttagaagtgactggggttgttgctgagaggttgtagttggatttaaaggttgatatggattttgttgttgtagttgctgaggttgttgttgtgggaaattcactgaaacattggcaaatctactaccgtttgcacttgggttttgtgtggcaaacattagtgcaagctaataattgatacaacctaggcagatcgcagattcaagcccttttccacctgttttcacgatgtcgaaattgtcttgaatactttacgtttgattcttctatattgcatattaaatgaaaaatttcgggtaatgaaataatagaggaacttagcattgaaattatacaagaataaaaataaaaataggttttcactaacaatatttatttcaattgaatcatttttctccattgatttttataaccaccttacctttagccttgttagactttaacctgtccatggccttttgataatcatcgaaattgtagacggaatcaatcttgggagcatacttgccatctgcaattaatttggcacctagatccatgtactctcttttacagggcagcgtctcgagtgcgtagttgtaacctctgaaggggttagctgccctgaataaagaacgagcgcttgatatgttaaatggatgtttgttgaaattgttcttgtaatcaccggaaatgctaatgtagtatgaattctcagatttgggcttcaaaaatttgtccatgacagggaagaaatcattgttaccgacagaatcaaagattaggtcgaacttttcatttctcaaagtgcccactagcagtttacccacttcttcggtcaaagggccctgatcgtaaggaaccaaatgatcgaagccagcagctttattgtgttcaaaagattgacttgaacaaataccaacgacggtccctacatttaaaacattcttggctatgtggaccaatgcataagacactgaagtagacgcaccaatgaccaaaattttggaatcaggacccagtttttggccataatcaaatagtgccgtgtgagcagtaccaaacactaatggccatgcggcgtttaaggtgaaaggatcgtatttggtgtccaatttggtggtatcgtgaatgtgagcaatagccttctgcacacttggatctaaaatcaaatagtcacttaacgtaccttgttcaccatatatgtgagcgaaatttcctacaactctgtcattgattttccattcgggatctactttatcacctgcttttacaataacaccagcatagtctcgagaaaaagtcttggggctagaattaaacggtagtttaaatgcaaggttatgaaccattacatcgatagggttcagagaagcggcatggatcttaatgacaatttccgtatccttgaagcagcgatccaaatcaagttccttggtagtaatcgtcgcaggagttttgttattgataaatgtaacggcacggttgataactttactcattatgattatgggaactaccaggcctctcgaaattatccaactgtttgtatacttcgttggttctatcgagcccgttaagatcttccatatcacataagcctttcttgttcagggtaacgctcatggtacgtcgtcatagacttatgagttcttcaatcgttgatccattgagtccaattcacttctcattttgacgtatcctaaatgaattttacccatgaaatgatccgctaatcttctatcggtatccaatctcgaaagatatgcaccacatacttcacagacttgaagtttctgttgagcactctggccaacattttccgtcatgttttttactttcttacccacttctaccctcttggattgtaattcctgtaaatttctggcttgaatcatagcttgtgacacttcgttagctctaatcagagattctatctcctgaatcatgagtccaattctactgtccaagacatctagttctgaagtcacttcttgaatcctagcgcgttcctctggagtatgttccaatttctttagtgctatagcaacttggccattacaatcgtaaatgaacttgtgtaagatagcatagtactcttgttcgaattctgggaattgtttaccgcgttttctctccctctcatattgcaacttgtgtttagctaaatggatttgtggacatctacccatactctgcttagttccttgaaacaaatcgtagggacattcaccaaccaggtacgatttacagatctttggatcgtatagtccgaggtctctccgtttgtaaccgtaactgggcctattttgaattttgttagggtccctgcccattagctgcttgagcagcttacgttgttcagtagctgaagaacccattatcagctttccaaatatcttaatagtttacgatgcttcttgatagttatggttaaggtgttggtttaataccattgttgagcgcggtgtcaatgacagaaaataccaatgaggaaacgacgacacactaatactttacgaaaggaaccagcatcatagctgttttaatatattttgtaatattcttgaaattgtcaagtattttaagatacctttgaatttgctacacgcattttattttgtaagttattgcatttttacttgtacttgcaaaatgatttattcaaaagcttccagaagatgttgtctgattttatcttaattctacctcttctgtcgaatcgatacgataactcttatttctaaattctctaacatagtttgactatgcattttcgaatattttatgtacatatagtataatcgatattttcaatattaatgtcgccttcaccatcaatgataacgacacaataagtaaaccaaagactatgatctctcaaaagttgtataagtttgccaatttaatttatggtatcgttggaagtggaaagaaactagaatctactgatacagttctcatcctaggcggttccaacggtctaggtaaagacatatgtacacaattgtgtcaaaacgagataaaagtgattaatgtggacacacaggacactagtatcccgctaatgggcaaatgctatacatttattccttgtaagagctttgcagaaacccacagtgtgcaagaagccatgcaagcggtaaaatctctggtccaaccgattaccattctgattaataatgtacaaagggatttcaaaagtgtctatcaaatggaagagcctttgagtcctctagatgaatcgatcgatcagttcaaagaatgtgtagcggccaatttgacgaatgtaatgattgccacaaagttcttcctcgagcaattggtccctcaaagtgtttgtttgactggaaataaaagtcaagactattatctggtcaatttaagttctatcttgactttaaacgtcccagaacaggcatctcattacgtctcttctaaggccgccctcaatcaattccacgattcattgacttctgagttaaaatccagtagacacaaaaaagtccattataagactctattagtctttctgccattcagtaaggattaccttatatggaatcaatcgacatcttgtctatctcaacaactcatcgactgtctacatgacggtaggaaaggtgacgtactactaagaatagacgattcacctctaaccgcttttaaagtgagtgcctctggtagctgtagattcagtaatatggtatctaagtggaaacagtgaatagtattttgtatacagtattaaggttagttatcgattaaacctttcgtgaaaactgaaatacaactaaacgaagtaaagtacgtcgatgaattccactatacaagcctggttgaagactggatcctatgctgttagggctgtatgctttgttcacataatacatacctatgtctatgaatttacagagacaagaggtgagtcgatgttaccaacactagctgcctctaatgactacgtacatgcctttaagaaatataaggatggtaagaattgtaagatgggggattgtatagtagcagttaaaccaagtgatccagatcatagagtctgcaaaaggataactggtatgccaggagatgtcatattagtagatccaagtatgggtactcaactagatagactaccgagtgatgtagacgaaattgatgaggacgaaaactttaatacatatattaaagttccaaagggtcatgtttgggttacaggagacaacctttcacattctttagattcaaggacttataattccttgcctatggggctaataagaggtaagatagtggccgctaatgattttaatcaacccttctggagtggatccaaaggcaatttctggggatttagaaaaatcggcaacagttttgtaaatgaagattgacgtttctctatttcttttttctatacagtagtttactagtagtattagcaattgattaacgcaattctttgccccagcttcttagaaagtgggtacctaaccataaagatggaattgacaaaaggaaggtgcatctcaaagtttcaaagatgctagtaccggtatagtagcggacaaagataaattcgaatccgataactgaaccgacaaatgccaagaaataaattgtgttcaaaccctttggcaaaccgctccatgtcaaagcaccagcactcatccagctaacgactaatccaaatgtgactaatacaattagaaatgaaaagatttgagcaaatgaccaaggaacggtctgaggttcagcattgaatacgtgatgaatttctggttttgcctccaatctctcaggcttgacgtattcaaatgcagtttcattaacatccaatttaatatcgaatagggacagtaagaatccttcgtcttcattagctaacaccagcgatcctgctaacagttgcttttcattcacggctagatgcaacaaatgttgggaaagttgatttattggaattctgactctgtaaagaagcaaaccttgattctcggttaaagttgcttggatggcttgttctagtccacgatctggtaaacctaacaaaagagttgcttgtgtaagtcttgaatctgaagcaaaattcaattctacagtttggtctaaagtatccaaagtcaatggtttattcaatttcttcgtttcatgatcaataggtcccaccataatccctcttgtatcagtatcggggaaggcaaaattggcatccttgatggtcaaggcttgaccccatgaagccaaagcaagtagacctagggctttcaaaaatttcatcagagctttggataaaaaaaaaaaatctactgaaagctcacttcttagcgattgtgcttattttccctttttttttactattataattcaattcaaatatgtttataatgataatataaaggcacatttggtctttggatgaacgtgtccaatgaaccaatgctctagtttgttacccgcacgtcttctcgcgcctccagtgaacgagcgatagcgcttgtagtactggtttcagcaccgggcgcatcccaaacattggcattgggtcctaattgtggttccactgatggttgtggtgttggtggtggtgaattaccagcctgcgaattgttagtaccctttttttgattacccatcttgctcaaagtagattttagacggtgatcagtcttaatgtataatgattgggcaaatttaaatgtaatatcacttagaaacccaaatactaccactgctgatgcaaataggaatgatattcctaatagcggtatgataaagaaactggcgacagctgcaatggccaaaaatgacacaaaatagattaaaaaatagacagacgaaagtgttgccatgagtgtaatgaaaatgaagagaggtaccgagtttattgccaccacaattacaataaaagtcgtagaataaggtttcttttgaaatcttgtcaccaatttgacgaacccgcttctaactaaacctgctgatctttgacaagatggtaaaacgtaattgccagtgaatgacgatattccggaatttgctgcaaataaatcactgtaataaatattagggaaggaaaaattctagtgatacgtgccttgtatacccatattgtttttgcgtcgtgcggctgaaacacttataggcatcgatcacgtcaaattatctccatcccattcatgtagacagtagttagtaaaataagtctaatcgaggtttgaataattttatgagcaatcaagcacatacctgacgaatgaagttaatttagggaaccaaacgttcaaataaatggcacctaaccaaaaatactcgtataattttgattgcagtttgtcgatcgaatcaacagcttttagggccactgaagtccattttttgcgaagctgtgactttagataagctccgcgtttgccggcaactgtagagcctgatccaccgccatcaatcataccactagtataagtataactcaacaaaagttcttgtacttcagattctgtaaacggtcctttaatggaatcagccaatttttcaactttctcgtttggtatctcgttaattggttctaaagtcttgatctgctccttgagtgataaaggtttagccgccgatgcccctgaactctcagatggtcttggtgaaaacttaacgtcgataataggtgaaaatggttgcttcgaattttccgcttctctatctggcagggcggcaaacttcatatgtgctgtcgaattcagctttaaattggacttgatcggttccggttcttgcgacttaccctgggacttctgcaacttgcgaaacgagttactgttcctctctttaaatttaggtgtggtatttactcccattgcgaatttgaatcttatagactatagttctacgagttgtttctttcgtgaagatacttagttagaatagttgtttaccgttcaaagtttttatatttcatggtgtgggataccgagatccgtcactttttaattaaaataacgagatcgatgagaggtaatggataatagctatataaaatagtatttcgaggaattttaaaatgatgggatttagacggctagatttttaggattgtttcgataccaagatcgtaaatttttcttatcaaacgcctctgttatgtaattatatgcattgattattgtaaaatagcactactgccccggtcatccaccacataccctatcaatgtatcttgctagcaatggtaagtcctttattggaactctgaaccattccttatgcctggtatgaccttcgggatcacaaccatagcaccaaattaatccttgaccgtatcgctgccagagttgcctgtggatagtattttcaatcatagcgagtgttttgggacctttgccgtttgtgtagaacccaccattattataggtttgcaattttggattggatggccgtactttggatccatttagggataatttactcagaattttggtcaaagtcctggaatttcgaccagattcgtacagcaaatgtattctttcaggtgtcaagtttattactggatgtttacaagtattctgccattctagcaatctagtattgacacttgatctagtagtcatgccaattttgcaaagaatctgatcgttacttgaccaatgacgccttttgccgcgagcactaagtattgattcgtccaaatatagccaatcgatgtctgctacacttcttgttaccaatgaatggtacatgtgctcataggtatagatatagatgaacccaggtctcacagcagcagcagatgggttcttagcaattggcgtctgatgatttgggttctgccaaatatggtgatgacaatacgatccatcattgacttggatcctgcacctttgtcccttcttagttacgcctaaggcactgcattcgttgttttgtcattcgagtaagagtgtataataagagacaccttttgtaaatatgtcaataaatcatctcaaaaaagcccaccaaaaatacacaggcaaaagtcgaaatgttgatcacagaaacttttgaagacgttaaaacgtcttatggcactgatttacgtgtctatattttcacccctaaggttcatggatatcctcatgctaaattccctggtgttgttttatacagtgaaatttaccaagtaactggacctgttcgtcgatttgctcaaaaaattgcatcaaagggctacgtagtagcagctcccgacatctatcacaatttcgtttcacctggtccacttgcctatgatgctaagggtaccgatgatggtaatgaatacaagattaagaaacctcttgagtcctacgatgaggataacagactctgtgttgatttgctttacagactgccacaatttggtggtagaattggtgccactggtatgtgccttggtggtcacttagcctttagggcgctattggacaagagggttacatgtgcaacatgcttcttccccacagatgttcactccaagacacttggattgggtaaaaatgacgatactttacaaagagtttcacaagaggcaaatgcggaccaggaattggtgttaatctttggtacttgggatactcatgttccaccagagggtcgcgatttgattagagaccagttgagaaaatctggagttgcattcagttttctggaggttcatgctgctcaacatgccttcattcgtgatgaatctagtaagggcagatacgatgcagaaattaccgattcatgtttagggtttttgttcgagcaattcaaccgtaaattgaatttaactttgggagaattcgtaccagaacgtggtgaactaaagcatgtctgttagagagaatatcagctatgggaattttataaaagaccaaattttttgggagaaaaatcgaaggaattgaagaattgtggatcactatacctcgtcaaaaaaattgaaagtaagtagatgtataactaaaattgattgattggatcatcccctctatctgtctttcgaattatgaagaatctcattcctacgtattttaaaccatttttcaaataattctattatcagtgctaaattgcccattattccactatttggacagaaaaaaattgtggaaaaatcagaaaaatttacaaaccattttgaaagttatgaaaaccattcaacattacgttccaaccttctaatattttgaatattaatttttgaatattatcattattattcttttatcggtgtggttacccgcacgtatttcgatcgatttgaaaaaaattttcaagtattattcaaaggtattacctacaatacagagatgagtacgcctatatagctctgaagagtctattaaaatagtaccaaaaatcaatttaaatcgccatgagacctattatgttagtggggcatgaacgtcccattacccaagtgaagtacaatcgtgaaggtgatttagtattttcatgttcgaaggataatgttgccagtgtgtggttttcaattaacggtgagagattaggtacgttagagggtcaccaaggttctatctggtctattgatgttgaccaatatacacaactatgtacaacaggtagtgccgattacagtgttaaagtttggaatgtaagtgacggtaaaactgttcatacatggaaatccccagttccagttaaatgggttgaattctcaccatgtggtcgttacgttttagccattttagatgatgttatgaaatatgtggggtctgtcaatatttatgagattaaaagagatccaaagactcaccaagtcttagaattcgtggaagaaccagtggcacgtattgaaacccatgaaggtcttgcggcagcccaagttgcaggttggtcttctgaaggtaaatatatccttgtgggacataaggatggtagtatcagtaagtatgatactacaaagaattacgaattctgtggatcattacctttgcataagggtaacgtaagtgacatccaattttcaccagaccgttcctattttatcacatcttcaagagattcaaactcttatattgttgatgtggatcaattacaagttttgaagaagtatgaggctgattgtccattaaacagtgcttgcatcacacctctaaaagactttgtcattctaggtggtggtcaagctgctcgtgatgttacaacaactgccgctagagagggtaaatttgaagctcgtttttatcataagatttttgaagaagaagtgggtagagtaagaggtcactttggtccattaaactgtgttgcagttaatcctcagggaacttcatatacttcaggtgcggaagatggtttcgtacgtatacatcattttgaaaagagttattacgatttcaagtatgaagtcgaaaaggcagcagaagctaaagaacatatgcttgcagcttaattttacttttcactacaattactgcaattactactaactgtatactactattaaaagatcaataactacaatttcacctaaaaaacaatttctatttacgttgatttttcatttgagctaaacgttcagcctccttacgagcgtctgcagctgcttgcttctgtctcaagatatcagcatcactttccatacgcttcttaggatcaccacctttcttcgaacccttagcggcttcttgttgtttcttcaagtttttctgacgtgctaattctctttggttgcctctggccattttaacctaatgatccctggaagttgtctggtactgtactctgcacaccttatgtagtgtttggttaagttcgagagtgtaaatcgtattggacattcgtagtaagatgactgggtggcaacaagagaaaattatgtgcgggtaatatgtgtgcaatcgtttaatgcaagaggtatggtatcgcaagattagccgccaataggagatcatagctctctagaattgcaatatattctgtctaaagttattgatttatagcgcttaaatttattattggactatgtaatcgctctgtcgtgaagcattgaaaaatgttggatagtaagaaagaatatgaaggaatggatattggtgttcctggcttaaccgctatcaattagataatttagctgtttatatgatttgaaccggaataattcaaagaaattgtttaataaaatatagttgttgaggtcctttgcaccgcaagtatgaggagccaactgaaaacttcttcaagagaacaaaacaataaaatgatagaaaatgtagatttatctagcaattgaactcattacgcttttatagtctataaatctgcctctcaattctttaaagctattagattgtgatatcgttcaagtatatgggggattttcgaaactcatgtgatattaatttcggcggctattcatattccaaaagggcgatatatatatatatacagtaactcatataaaatcagtgcttggattagctgctataagttttcaaaaaaaattcatttcttttgaccataggctctagtagcgtatttaccatcctttacaatgacatcctgagggcggtagtcgaatttcttggtgaagtagctctctagaatgtttttcacaccttcagcgtatctttgttgagcatccaatgaggtaccgctaatatggacagtcatagcgttgccaacttgatccttgttattcattgatctccatggatggttctttggtgctggttgtacatcccagacatcaccaccataaccagctaatttaccagatttaacagcatcagcgacatcctgtgccacacagatggcacctctggcggtatttaccaggtaagcaccgtctttcatgtacgagatcaattccttgttgaaaagacccttggtaccttcgtgtaatggcgcattgatggtaacaacatcagattgagaaaccatatcttccaatttttcaactctttgcacaatatcacctctaccgttaagcaattgactcacatcgttcaatctcttaatagcatcaactggtaaatcttggtagtcgtagtacaacaatttcttgggattaaatgcaacgagtctttccaaaactctgtaaccaattctacctgcaccgacagtggaaataactttatcctctaaatcatattcattcttggctacaccagcaatatcccattctccagtaacagcttgatcatgaccaccgttgtagtttctaattagaaccaaaatggtggtcaaaacgtgttcagcaactgaaaccacattagaaccagttacttcagctacagtgattttcctttcattagcggcgtccaaatcaacatgatcggaacctacaccagcggtaattgccaatttcaaattgggggcctgagcaattctggattcagtaatgtatgcaggataaaatggtgtagtaataacaatctctgcatctgccaaatgtctgtctactgctgaagttggttcaggatccttatcaatggtggtcaataattggtaaccattggattcaatgaattttctgatgcccagttcattttcaatagcacccaatagcctctcttgctctactgcgtgtttaccaccttcataaagaactaataaaactgtaccgttagccatttttaattgttgttttgtttttatcttaattgttgttttgtctgttgtgattgactgctgtgatgagacacaagccaatagagttctcaacgcagttctggcaggagtttatataccaaataatttggaatatgcgtcgctagatattagctactataccagtgttagggacatatatgccggaaggcggttagttcttttaggtatgtaatttcatctgagcgatccgctgtcgccgctttcctaatggggacactccgacgtttaataccaactgggaacgaagcgtcagagatatattcgagtatcgagcattgcctgtgaaaagtcgagtatgcaagtcagaaaataggaatgctaatgcatggagtttccaagttttttctttaggcagataattgatcattagactttaccaggactaaaaatgtggaatcaagcaacagtagatatttgtagatggtatactacagaacagaagggaggtgggtctatggattcagttcgaagacatcaaagacacgacatatttcagtaataccttaatatcttaacgactcatctcattgttacctaaccagaacaagttgtgagatactagcactctagaatcgtccctcaacagatcgacagttctctgaatctgaattcgtaacgttgatacaagtgaatgaaaacaagagcaagaagcaacccaagaagcactaacagctgatgagagagaagtccttggatgtaaacacgtctgaaaatacatccccctcatacagccgtcttggaatctcgatagagatcaaccaaactaccaaatatgcgagagcaggagaaaatgggacgtagtcaattcaatggggaggtatcgtccactaaaaacatctttttccttgattacaagatttcactaattcctctctgaaaaataaccttgtgaaatacaactaaggcgtgcagtcaaagaatatcgagaagttaagactagtgtgaacgcgattgaccaaatcctcgacggttgaagttacaagcccgcggatatgttattttattatacccaattagccttagattctaaagccttcccatggttccttctgaacccaacacaaatgtttggcaaaaactagcaaaaaaagaaaaaaaaaagtcatcaatgatctctaccgcttttcacctttgggttcctcatctacgaacgttctagtagctccacggctcatttcccctcatgctagctctcaagtttctcactgctatattcctcgctttattttctctgagccgaaaaaacaaaaaaaagaaaaacaaaagtcatggttctcaagtcccgctggcacacctagtgcgatgctgtactcaacgctcgaagatccacttagtaacacactagttgaacgggtgcaatcgatgatctcaccaacacgacagtatgacccagttaggcaaacctattttgtaccggaaggtcactaagcgaaaactccgcagctattgcaccgaaacgcacaaaggcaatatcggttaaaatgttcaaacttaattaagacagtaaaatccgatatcggcacatttacttcaaatataatacaacagaacttcgaataccacctcgtgagctcacacataagtgcatttgtaaaatgtcaacccttagaccgtggctagattgagtaagccatgacctaacacacacgaattcttgtctaaaaggctcccaaattttgaataacattgcagaaaattagcacattccgtttatcggtattcggagttcccgttgttactaccaacaagcacacccgtatttgaaataccattctctgcagggagaacagcacacatatcttgctgttattagtggtagctgaccctctagcatttttaccggaagctggcggctataccacctctttcatagttataccgccgaccaagcaagtacaatttcagcgttatccgtctaacactatctactactcctatgacccacaccggtatttcatacatgcagttgacatttcacttgcctttctaagtaaccagttgaaggatagactcattcacccggtttcgttcccttttataagtctctgcgccatcgaacatccctactttccccgcactcgtcggctatctgaactcgcttggttttgcaacatcccaacaccatcatctccttccaacaaccccgcttttaatttctcggcggctatttcctacaacttaaatctgaacaccactacggactctttcctttctcgaaaccaaacaccagtgtccttaattccgaatacatcgaaattactcaactccgaatatcccacaagccccgcgcaattcctacgtgagctcctcccattatatttaaatatatccgtatgcatgactcatcaacccagtctatatattggttgccgaatcggcccgcttttcttttttcttttcttattcctcgtccatcgtttctttttttggttcctcctgttttccattccccctctccgctgcttgctctcaaattgtagccgtgcgggtcataaccatgatataaagaggacatcctctgggtgaaaggtcgatgagagtagcgatgagatgctgttttagttatgggatgagatacgatgaataagatgtttagatcgttggcgggcttcgctagaagaagtcctagcttaaagactactgtacaatctagatgtttcgctagcggcaagacggctgaagccgctgccgccgcgggtgctaaaccatcacttcttcgtagaggtggtaaattagcactacacgcagccctttacagtgcattagcaggtactgcatacgtttcctatgagctttacagggaatctaaccctttaccacaagtagcacaatctgctacttttgccgatggttccccacgtaagactattgtcattctaggttccggttggggttcagcctcccttttgaaaaacctggatacttctctttacaatgtggttttagtatctcctcgtaactacttcttatttacacctttgttgccttctacccctgttgggactgtggaattaaagtctattgtggaaccaattagaagtattgctagacgcgcgcctggtgaagttcattactatgaagcagaagcgttagatgtggacccacaggacaaaaccgttaagatccagtctgtgaacaaggatcaagagtacactttggatttgaaatatgattatttggtttacggtgttggtgcacaaccaactactttcaatactccaggtgtttatgagaatgcatctttcttaaaggaaatctctgacgctcaagagattcgtgttaaaattatgactgccatcgagaaagctgctactttatcaccatctgatcctgaacgtcaaagacttttgacttttgtcgttgttggtggtggtcccactggtgtggaacttgcagctgaattgaaagattatgtggatcaagatttaaaaaaatggatgcccggtttgtctaaggaaattaaagtcactttggcggaagctctacctaacattttaaacatgtttgatagatcattggtggaatacgctcaggacttgtttaagcaagaaaagatcgatttatggttgaatacaatggttaaaagtgttgataagactcacatcagagctaaatgtggagatgagatgattgaagtcccttacggtgtcttagtttgggctactggtaatgctcctcgcgatgtgaccaagaacctgatgaacaaattagaaccgcaggactcaagacgtggtttattaatcaatgagaaattacagttattgggtgccgaggattctatttttgccattggtgattgcactttctacccaggtcttttcccaacagctcaggtggctcatcaagaaggtgaatacttggcaaaggccctcaagaaaatccacggagtagaccagctaaaatggcaaatcgcacaagctgctgaagaagacaaacagatgttagaatctcgtctagacaaattacaaggtgattttgaacacttcaaatacaaccacatgggtgctctagcatacatcggtaaggagaaagctattgctgatgtttccttcggtcaatcccaatacaaattggccggctctttcacatttttgttctggaagagcgcttatctcgccatgtgtctttctttccgcaacagagtcttggttgccatggattggtgcaaagtgtacttcttaggtagagactctagcgtttaatcggctaaacgataacgatgagttactccaacatacaatgctaatattatttacgtctcttatgtttaattctgtgtatagtttgtattttaatctttgtaataataatactactactactattatcattatctcatccttatacttcgctcgcgtaggaaacataaagtttaaaaacttagtactgaacttctagggcagcgaataatcaaattaaagagctcaaggggatgatggataccacaacagctgatcgagttcttaagctaccgatagattcaccatttgatacgcatcgacagcctgaaagaaatgacgacccaaatcaaaattctgataaaaggccgttggtaactactgttactgaccaatctttgagtgcagctgcagctgcagtagcgtctgtacaggatacatggggtgaaaactttaatgaaccactacctactaataaggaagatcgtattaagcaggccttagagttcatgagaggtgaaaggcaagcatttgcagctgataagaatatcaagaaacattctattagacaaatagcgatgttctttcaagtgccaaaatcaacactttatgacaggttaaagaacaaatctgtagatcctcaagtgagtgatggacgtatctacatgggtcccgcctattcggtttcttcaagggctcatagtcaacagatgaaattatcaccagaaaaagaggtggcgctattagatcaactacaccatttgtgccatgccctaggtaacactttaaatctgacccacattagagatttcatagtatcgttagtggatgggatctcattgggtaagaaatgggtccataattttaacaggagacatgatgacgccattatttatggtacaacttcaagccactacaacgtaagaatgttcaattctaaatcttctaggtcaaactttgaaaatctatggaaatgctttgttccattactacaagaacggattagacagataccgccctcacaacctttttactacattacgagagcttgtttccatcaagcttcaatgtccagcatctttacatgttttaaaataatgccagaagatgcatctatcagtttactttgcccgcccagagtaatagtattcccagattattttggtaaagtttatctacaattaagagatttaaaaaatgatgagaaccattttcgcgatgtcgatgaggatgtagaagatcacagtagtgcaagcagtagtagtgttagtgaatcaggtggtagaggtgacaagttggaaaaagatcacagcaatgtagatcacaataggattaacagtcaagagaaattacaaaaagaatttaaacacaaaaaattaaatgatgtatttcaacgaatttatacagaatgttgttctcaaggttcaaatcaagatgacgttccactagtaatctttgaaggttttgaagatcgttacaactgggatccaatcacatgtcgatcaatggtagttttgggcaaatttctagcattaccttggaatcaacaagtcttacaaaggctagtcattacagaattgcaacctgtggtagaagaactcgctcagagtgcttcgataacggcaactcaattaccgtctatggaactcgatttaggtcgtatggaattagacttggatccgtttatgcattctttgaggcggctcctacaatcacacacggaagtgctacctacaagtttaaaccataacggagttttagttaatgatctcttttcatctgcacttccacaatcaccaccaccaccccctcaaacggcggcaacggcatcaacaacaacgacaacagcaccaacaacagaccatcaccaagcagaaaattctacatccggtaatattttcgaggattcaacactatcacaattacaagaagtattaggtcttatcgaacataacgaatcacagatctacagagaactacccgacggatcaagttcgaaagcagtaatacaacaaatttttaacaaaatcagaggaatcttaccgcaataatgaagaatattacatcccggaaattaagaatatcataataccacagcatttctattactatgactaaaatgtcgtaatcatggttacccgccattggacgtataaagttatgtttttcgagtacgtgtagagaaaaaaaatttgacttcatctaatcttaagagaacttcgtgttgttgaccgtgcggagcaagggtatatatttaaaaggttctcctagaaacgcgtcgaggtcattcccaagagatatattaaggcctattcccatccttatttgattcaattatcaatttacatttatcctattggcgaaccaattgtccttttattgaatttttaataccatgtctcacgaaggggaagaagatttattggaatactctgataacgaacaagagattcaagttgccaacaaggctgaaggcggagccgatgcagccggtggtgagggtaccaatggtgcagaaggtaccaatggcgatgcggacaagaaagggtcatatgtggggattcattccaccgggtttaaagattttcttttgaagcctgaactttcaagagccattatcgattgtgggtttgaacatccttccgaagttcaacaacatactatcccacaatctatccatggtacagatgttttatgccaagctaaatctggtcttggtaaaacagctgttttcgttttgtccactttacaacaattggatcccgttcctggtgaagtcgccgttgtggttatttgtaatgctagagaattggcataccaaatcagaaacgaatatttgagattttccaaatatatgccagatgtgaagactgcagtgttttacggtggtactccaatttccaaggatgcagatttgttgaaaaacaaggaaacagcacctcatatcgtagtggcaacaccaggtcgtctcaaggctttagttagagacaagttaattgacctttcacatgtcaaaaactttgtcattgatgaatgtgataaagttttggaagaattggatatgagaagagatgtgcaagaaatctttagggcaacaccaagagataaacaagtgatgatgttttcagcaactctttcacaagaaattagacctatctgtagaaggtttttgcaaaatccattagaaatctttgttgatgatgaagccaaattgacattacatggtttacagcaatactatattaaattggatgaaaaggagaagaaccgtaaattagcacaattgttggatgatttagaatttaaccaagtgataattttcgttagatcgactgcaagggctaatgaattgactaaattgttaaatgcttccaatttcccagcaattacagttcatggtcacatgaaacaggaggaacgtattgctcgttacaaggcatttaaagattttgaaaaaagaatctgtgtctctacagatgttttcggtagaggtattgatattgaacgtatcaacttagctctaaattacgatttgacaactgaagcagatcaatatctgcatcgtgttggtagagctggtagatttggtactaagggtttggccatctcatttatctcttccaatgaagacgaagaagttttaaacaaaattcaagaacgttttgacgttaagatcgctgaattcccagaggaaggtatcgatccatctacttatttgaacaattaaggtttgtaatatctaagtaccaagaataaaagaaaaattaactgagaattcccgaaacaaaaaatgatgaattgaaggatcaaaggataataaaagttacaaatgtatacccgcttataaaatgaaacaaaaaggacaaaatatgaagattgcgtgttcgctcgtagatctattcaatatctttaacagtaccatctacggtactaaaccgtttcatttttggcatttggatcggtaattgctttagaaagttactgtgattaccattccccgtcgatgtagatcttggttcaccggattgaccatttatagattctgaattgggaatcgccacactgacatttggactatgtaatatttcaggttcggtcgtattgcaatccgcaggccccttcaagccactattattcgcctgtatagttgtttgatttgcggaatcttcatcaacttcatcatttaatacttgtgacgctaacatgcctaaagttcttaacatatctgatgccttttccttgttcgacgttgatgataccgccgtcggtgtatttgatgcagagcttggcttcaaaaccctattaggtgcgctattattactattttgattcttactattattattattcttgttattattattactattatcatcattaatttttggagtatccgaaatggaatgttcatttaaaattctcatcagtctattaatctctctgttcttttcaataattttatttttatatttagccaccttaccatctttagtctgtattcttttaattaaatgttccctctctaaaaacaattgacatttcttcctttcaaattgctgcttctttaaattttcttccacttcatatctcgattgaacatcaccactattagatttaagaatcatattcttcaattttaactgttgattttgtctaacgctttgatttaaaacgtgaattaatgaacttacaacagcgttaatatctctgggtggaataaatttatcatatttggcatctaggattccatttaatacttgttttgaattttcttggtcctgtaaattactactactcgtctcattttcactatcttgttgttcaaatacccgcattaatttcatcccactagctatagccatttgtagctcttcattactgacgccattctcgttttcgttttcccaatgaaatgaagtttgtgaagacgttgaaatgtctctagtattatcatttgtagtcgttgaagtatccaccatcgaatgtctcaataaacaataacaataacaataaacaataaacaatacaagtggaagctcttagattttttatcagtaccttggaactagtgttgtaaatccttgaaatggtcctacacgcgtattaaacactataacgaccctcaaggactccaaacctcgaggaatcgtgaatcttttgaaggatttacccagatcttcaactatatggtgttgagtccattatgtttcgcgttccacgtaagaagccatcctgacgcgtaaactgtcgcgatgagtttataaattgcatagtaaggtataataataatataactgatgagcacgataatacgaaaaaaatattgtctggctaagcaagcgttacttagtaccctagtattaaattatacagtagttgtaatgtagtacagtaaagttgagaaacgaaaccaccaccacatgcatatatctttttaacggtaggatttttggaatctggaacgagcacctttaccaccgaatttcttgggctctggtcttctggagtcggcaatcaacaaagttctgtcgtaagaggtgaaagccttcttcaattcgttcttagattgttcatcaacgtatttttggtggtaagcaacaagaccctttgcaattgcttgtctgatagcgtaaacttgagagacgtgaccaccaccggagattctaactctgatgtcaacgttggcgaatttgtccaagcctaccaacaacaatggttcgtaaactttgaatctcaaaatctcaggttcaaccaaagtaattggagaaccgttgaccttgatcaaacctttaccggccttaacatgggcgacggcagtagcagatttcttcttaccaaaggtctgttaaaacggggaattaaacgttagtaattcattcaaaaaacagattacaggggaacagtgacacaagttcactcggtttcactcataacatacttgcacactgggcacagcagacatcttgcttaattttctttattattgtcggtattattgatgatatctgttgaaatttcagtatggtatacttttgaaaatgttgcgtcagagactgcgtcggtaagggaagggtgagaggtccgaggtctcgtgagagtgcgagtgcgagtagaagggacgatgctagggacaggtgggagggagaggaagcgttggaggggaacctggtgggaggaagccaagagttaggcggaggggaatgagcgtaccgtagcaggacgtgccctctacgctagggaggaatgtcatcagagcgagcgttccgtatccgacgcaaaaagcctttgaagaaaaagttagttaggatgtaaggatgtaagatttctagcagtcactcttaaacaagtgactgtctcaaattatacacctgtacaccatataagttttttaaaaaaagtttctgcgtggataacttcgcttggtacgcgtcctgtacgacgcagaaaaaaaccctctctagacaggaaatcctgcctagtactcgctagacgcccgcccagcactccctctagcattccaattcgctctgcctagctcctcctagcattccacctagcgcccccgcctgcgagccgctcctccagattggcaactagcaggaaagtcccagctcagtgtagcggaacgcttcggcgactgacgacgcagtttgacaaaatagtccgtacacattagcgatattcaatcgtattatcacaattattccaaggtagtagagcaggaatcaagcaaaaatggctgtccaccacaaccaaccaattttgaaccctcatttcagaaagcactggcaagaacgtgtcaaggtgcacttcgatcaagctggtaagaaggcttctagacgtgataccagaattgccaaggctgcccaaattgctccaagacctttggatctattgagacctgtggttagagctccaactgtcaaatacaacagaaaggttagagctggtagaggtttcaccttccaagaagttaaagccgcaggtttgactccaacttacgctagaaccgttggtattgctgtggaccacagacgtgttaacagaaaccaagaaatctttgacgctaatgtccaaagattgaaggaataccaatctaagttgatcgttttcccaagaaacggtaaggctcctgaagctaaccaagtcttatctactgctgctaccttcccaattgtccaaccagctactgacgtggaagctagagctgtggaagatgatggtaaatctgccttcagaactttgagattggctagatctgataagaagttcaagggtatcagagaaaagagagctaaggaaaaggctgaagctgaagctgaaaagaagaaataagctaattagctcctggtcccctaaactgtttatgtacattgtataatgggaagttatatcattaatagcactagctccagttgtgactaacatttgagacgttcttatcaaatttattatgccgtgttaacattacatgttgattctatttattaatattatcaaacactcgatcaatcaacgacgagttaatttttcttctagatgaaagatactgctcgattaaattaggctaaataattattatacaccttagtcaaacagaccgaaacccatgtcatcatcggattcttccttggcttcttcttccttcttttcttcagcagcttctgcaccttcagcagcagcagcaccaccagcggcagcggcaccaccagcagcagctggaccaacgctgaagttgaccaacaattctttcaagtcttgaccttccaaagccttgctgtagatgtcaccccagatagcttcaactgggacgttagcagcgctagtcaaagtcaacaacttgtcagaagagatttcgacttcagagtcggcaaggatcaaagcagcgtaggacaaagcagtttcaacagacatggtcaattaattagtttcagctctcaagtaaagataatcgatttaagctttggaaagcagactattcttttgagaatctgagagtgatgtcttgagatgagatgtaaagttacatcaggtagttcttttttcatcagaacgctctttgaaaaattttgaaaaaggtgaaaagagtgcgtggtcataatatacgaagacacaagcagtccgaagcgacccggtatactcggacatatgtttttgtccggagtacaccggacccattcggacacttaaagggagggggagagtccgaggcgagctttatctgatctacacttacctccccattagcggttagagaacagagggcagaaactcaatgatctaacctttacatgggaataaacgccctcttattttgagcctatacaaaagtgttggaattcgtaagcaaagaaaacaaaaaatgtttgcgtatcgccgaaccagcgaaacgatgcaactaagtaatttatacagtattttgtgttctctaaggtaaaaaaattcactctgtattgggaccgtatattcctgctctttttttttttttttccgtattttttccttttctccttgaaggttctcttggcatatctcatgatgatcatctatgtctttgagaacttttcctctcttcttcgtcaactaaacttaaccgaatggcttgttcgaccatttggttctctagttcagccattggatttggaacgagacgttgtgaacgtgcagttgttggagtcggtccagaatctgtatttgaatccctccttgaaggatgatcagggtcaaccaattgattactcacatgaatagcggtagcatttgctgaacgtcttgctaatcttagtctttctttatctaatttggccttccaatcaggtctaatcatatctgaagtaacaacttcaggatcttctggtgattttgaaggtgttcgtggaccttcttctgagtcagagccatcattaacattaatttcatcatcacgtggcgccttataagaaccaggtggcatgccaccaataccggtcttacggttggtaggcggttggtaggtaataccgaagtttggtgttgcgcaatacgcacaacttgcaggctcactgattaaaagattgggatctttctcatcatcactagtaacaggttttgtaggatccacttcttcatggggaaaatgcggatctccccttttaatttgaacaaaacattccgtacagataggttgaagacaacatctcgaatagtttaatggttcaggatagtacaagaaacaaatcggacactcaataccctttttgtaaatggtatggttaagatcaggactaggtagagctagattacgttttgaaggatttggttctcgtttagactctaatttttgttccaaaaaagccacattttcctgttcctgccacattattcgtttacgatgtaaccttgccttaaaaattttagatctctgctttcgttgttctttcttggatagtgatttatcgatcaattcatcaaaattttgtctcttaaggttcccaataggaatatcttcaaattcttcagggttttcattaacagctgcatgcaaaggtaacccatctacaattttaattaattcatctcttgtccatgattcatcaaaatcttgtaatggaatataaaatggtgctaattttctagcagtaatcaaagatcttacaagggaaggatcataatccaatttctcaaacgtataacacccatgcggcgctaaatatccaccatctacactttcgtcgtacctcaccactagctgtttcgcaaacgattcttttattaaatctctttctcttgttgattttttcttatacatcaactgggatcctgtggagttggcccttgaccttacattgttggacaatcccatagacactcctcttcgtctctcagcaatattattcggtctcatggtacctgatccaacacttgtagacctccccttgaatgcattctcattttcatctaacttggcaaatgtattacccatgccccttcttgaatagattcaaattaatatgtggtttagcctatcctaaacggctctttggactatatagttgacaatttgatgttcttatactccctaacttttcgaacccccctttccttttcttactcattataaggcgctacgtcgaaaatgatattaataaggtgaagaagtaatagaaataaactctcggcggcattttttttttttttgtaaactaagtttcgtcagttctcctagtatttctttagcataatagatttactctttggaatattttttcaatacatatcaatacatgtatatatataggtatgtgtgtccgtgtgtaccatatggtactcacctcaatccttcgtcttgtagagtctttgtgagatctttgacggtttgttccaatttagagcatagtagttcgacttcttgttcactaatgatgaatgcaggtcctaaaacgacgatatcccaatgctcacccttagtgttaccaccggtaagacccataacgttagcaccattgttaagagctaaatctgcaaaacgagaaccaatgtgcaaagattgatcaaatggctcctttgtagatttatttttgactaattctatagtccaaaatccacccaatccacgtacatcaccaacgatgttgctagaatcagataagagtgccttttgcaattttgcacccatgagattgcccattttgaagacgttggaagttagaccttgtgcaaagatcttttgctgaatttgtagagcaactctacagttgaactcatgggagtggtaagtttgagcaccaacaacaacacctgaacccttttcaaaggcatcataaatctttgggcccactaaaacacctgcaatagtgacataaccggaacccaaagttttaccaacagtttgaatgtcaggagcatcttctggagcaaggaaattctcccagcaacatagtttaccgtcattgatacgaccagtaccacacatgacttcatctaccataaagatcaaatcgtatttgttacagatatcacgaatacccttcaaatagttctttggtggaactggagttccaatagaactacctgacatagtctccacacaaaccacggacacagtgtttggatcattttcgatgatcatcttctctagagaatccaataatctttgagcgtactgttcaacagtttcaccctctctcattcttctatatggatagaacataggcatctttagacagacattctcttgatcaatcatgatgtccttgaagggaataccacgagggccatcaccgatagacatagcacccaatgtaaatccatgataggcaccttctcttgatatgatctttagtttttctggtctacccctttctaattggtattgtctgacaatcttaagggcattttcattggattcactaccactgcaagtccataggcacgatctaaagacacctttaggagtcttatcgatgtaaaatctagccaattcttctgcagcttcattaacgatgtatccagggaaactgtaagtgtggtgtagcgctgcgtcagccataatcttgtgcacatctggatcaccccagcctaatgaaccaacggctgcacctgtaatagcatctaagacctgcttatgctctttaccatttttttcaatggtcataaaaacacctttaccatccttagcgatggcctttggtttggcaattgaactgtggaaaacgtgtgaagtcattataatgggttggattgtttgtttctatacaagtgatactttcacaaaccattatccaaaagccttgccctttttatacgactctagctatcgctttggtttacccaataggtcttatctctttgttcgtgtggtttcccaggctgctcattcagtcggataaggtacgtgcgattaacattaccgcacactttgccaatgatcttcggcgctggatacccgatcgctttacaagcgttagaaaatctacaacaatataggagtagcaaccatctatgggcccaatttcaaccttttcaccgattcaacgcttgcacgcctctcttggtctctcttttcttcccgaatccatttttccctcagcgcttgcggtacatccattggtggtagcataatctctaaaatgcgaattctatcaccaacggaaaaagctggatcattcaccatcgattgaaaatcgccaactgtaattatctttcgagattcgtagtccttagcaccaaagactgatggtaaagtagaataattccattgttgaatatcgtagtaacttgcatttgaatgcaaaaatctatcaaccgaataaccttgattgttcatgataaatatataaggtgtaagcccccaacggatcacagtggaaagttcttgagcggtcaattggaatgcaccatcaccaacaaagagcaccactctatgcgttctcggcttctcatcaactgccatggcggctcccaaacaggcacccaatgaataaccgacggatccccaaagtgcttgtgatatacccaaagtatgaggagggaaattagtttgattaataccaaaggctgaagtaccagtttcagtgatgataacgtcaccttccataaaccattgagatatttgattccaaacccattcttgtcttaacggatgtgttgttggtagttctagctttggaatgaccattcgtggtctaggttgccattggtagctcaattgcctttcttgcaagtttgctagcaatgaatgtaacaacggtttgatgctaagatcaggatatgtggcatgcttaaatttaactgatgttggataaagtagcaccaattcattggccctgtaattgaagtggaacgtagtagtttcgaaatctgccagcatacaaccaataacgatgaggcaatctgcaaaatcaactacttctctaacggaaggcgatgaaatggagcccgtataaacaccaccaaattgtggtagaccttcatccacagaacctttacccatcggggtaacgaacagtgggaacttagttcttcgacacagttcttctgtttcggcctcaattctatgtctagtaacacatgcatctgctacaatgacgggattagtagctttatagaaatgtgttaagatctggtctatcacctcgttttccttggatgtatcatttggcgggacgctgagatcaataggttcgttaagtctatcagaatctactggcatgcttactaagttcactggaatccccatgtatactggtctttggaaaatatatgcgtttctaatgcattcatcaacttcttgcgcacataattcagtatcgataattactgcagaatgacaactcacctctgtcgccattctatgaaacactgtataatcaccattacccaaagtatgatgcagtagcagttgcctcgtctgggcactagtaggtggcataccaacaacatgtagtaacccaacgtgctccgcatatgatcctgcaattccattaatggcactaagttcaccgacaccgaaggtcgatatgatgcatccgagaccttttagtctagcgtatccatcggcagcataagcagcattcaattcatttgtgttacctgcccatctcaatccttcaattccatataatttatcaattagcggtgcgttaaattcaccaggcaatccaaagatcgttaatacttcaagctgtttcaatcgatggaaaaaataatccgcaattgtgatcgttggccccatcgatgttgtatctacgtacatgagccaatcactatgatttcatgcgtgataatacgagtttatagtatcagtactcatgtatttgtccatacctatgatttttttttcacatttcggggtttcccgtatgactactagcacaagaacaatacttctgacaataaattaatcagccgggaagtcaatggtcagtcagttagtacattatatcgtattaatatgtgctatttactcgttacaataagaaaaataaaaaggagtattaaaaaaaatcaataacttcgtcatcgtatctgcgttggttgcaattttaacctgacagcctccaattgatcctgtgtcagatgggccaattctgtatcatattcaaattgtaatagttgtaatgagtctacaatttgttttaattgaccttgagcgtgacgtaattcatcaaaataagaagaacatagacattgcaatgcgttaaatctttccatgggatcatattttagagtgtcggctagaaattgaactgtttgctcatcttccttcttaaagaccctagaaagaggaattggtttaatttgaggaaatttatgttccatataatttgggttcatagcacatatctcttgacgcgaaggtgtacctaaaatttttataatttctactaattgatcgataccactttcacctggaaacatcggttgacctaaaagtagttctgccataacacatccacttgaccagacatcaatctgatttgaataatgagtagctccaaagattaactctggtgctctataataacgagagcaaatgtaggaaacgttcggttccgttggttttaactgttttgcagacccaaaatcacagattttcagagcacatgtgtttggatccactaataaattttgaggtttaatatctctatgacaaactaatgcaaaattatgcagataattcaatgatttgaacagctgatacatgtagcacttaatctccaatcttggcattgcacttgggatgtgtacaaagtgcctcagtcgctgatataatgactgaggcatgtaatccaatatcagattaagataaacttcaccatgggaatccttttcataaaagtaatatttcaaatcaattatattagggtgcttaagcaacttcataatttccaattctcgatttttgaaacgacgatcttgtaaaactttctttatagctacatcctcgtctgtctcctttatagtagtagtgaaaacaacaccaaatgaaccatgtcctacaacctctgtagtaggatatgtaatttctgcaggttcattttccccgttattacctgaaggatgaccgcaatacacttgcttgtgtaccacttcggtattcgttacaagttctaaattcataattgacgtttcaatggatgggacgggtaaaaggattcccttcttattgagaaggattagcttaacgttatgagaagaatgtagtccttcttatccttcctatgctttttcttcttcttcttcttcccagatccagatcgattgaccagtgaagttatattgagatgaccttagagtgtgaggggtggataaatacaaaggtgatactaaaccgtcaaaggccaacaattagatgatgatagtaaaaaaaacaaagagaagcgagacagcgcccgttagaggtactcgagttgacaattgagagatgagaggctcgatatcgatagcaggtttgtagtaacagctgtgtattttagatgctgaagttaagtggtttgacagggttgtggggattccttcggggagggaaacagaccacctgagaatggggggataaaggaaaaatgggagggaaaaaataccacgtgttattcacgtggtattcacgtggttatataacatgtgatattcacgtgctctggcacggcggtaggtatactggaataatacagtgctgataactaattattcatcaattaattcatataaagtcctataaactacgcatcattcctacaatttagcaccgagagcgaatttcttgcccttgtcgatattaccaaccagttgacgaacagattcactgaccagtttcttctcttggctggacaacgaactcaagatagatgagtcgactttcgaaacactaccatttgaaaataccactggcaatgcaaaataatcgacaccgcccagtttagattgaacttcagatccgccgttaatgcctggtaaatatacaaatgtgggaactccgctaacctgctcaccagcaagacttttcaaaatagagtccgcaaatctatagccggcaaatgccatcgacagggttgcagagccagcgcctgcctttgccttgacaacttcatcaccaccgaattgcacacgatgaacaaattcttgataatgtggctttaagccgtctcttaatttagggtttaaaatcacggggacgatcgtattaccagaatggccaccaataacactgacatcttggttcacctgtgttttgtcacgacctagatattcaccaaggaaagtctcggctctgacacagtccaaagtggtaacccccatgacgtttccaggctgtagcttacccatacttttcaaagtttctaccgcgatgggcacagtactgttgactgggttgctgacgatcaaaagacgtgcctcaggtgcgtattgagccacactggtcacaattcccttaacgatgcttgcgttgatcttgaaaagatcatctctagtcatacctggcttacgtgggacacctgctgggacaattaccacatgagcaccttgcaaagctctagcaatatcatctttctcgaaaccttggcacaccgagttcgtactaatatgcgataaatcctgagccacaccaggtgccaatctaatatcgtaaagtgagagttctgtcactagtggattcaacttcataagaagtgagagtggctgaccaataccaccagacgcaccgactattgcaactttcatatttgttcttgttcttgtttgtgcttagcactatgtgtagtgcagaagtcaaagaaccgtcttaattagaactatagaatcctttatatactgcaagaagcgatcgcggaacacagttcccgcatacccataccggttctgccactacagggcacgaattgaaccttgggcaattggttctgtaattgtaggagttccgattggtagtcctccaataaatcacatttgttgaatgcaattatgactcttgagtcacccatcaggaacggttgtagctcttgcaatgattcaggcagtcgatgcgaagaactgacgtctatacaccaaaccagcacatccgttgtatcgtagtagttatcccagaaaggtctcagtgtagtttgaccaccaacgtcccacatggagacgttgtagggccccatttctacgttgtgtatggcaaatcccaccgtcggcgacacatggtgttgtcttctctcttgaggaagtaattggtttactatagtggatttaccagcattatctaaacctaggataaggcatcggatctctttgtccctcagtttctgcttctttacaatggtcaatagtcccatattgatagtaatcgagtagatgcgatgagatgcgatgagatgacttacactttttcacttcgactaattatactacaaaagcatctaaagagaaatagttatgggaataaagaggcagaggactcttgctgaatttggaatctctgagactcgctcgttgcagattcgtaatcagcagtctagctttggtagtagtcaggatcccatcgttgtagaggaagatgaagagcgagtacaagaggtacgatgtccactatgtaatgcggatattacacacctagagatttatatgaaggaggcacacgctcagaaatgtttggataaggcaccagaacctaagaagcccaaaactagaccacctttacctggcactaaaattgttaagttattcagtttgcagatagttgtggacggatttgcatatgatagacatggagacatcgaacactatttcctttcacatttccattcggatcactacggtggacttaagaaatcttggactaatggtattatctatgcatcgagcattactattaacttagtcagggataagtttaaaattgatggatcaagactacgaccgttacccatgaatgaaaaaatttggattactgataaagtctccgtagtattgttagacgctaaccattgtcccggtgcagtggtatttcttttcgaagagtatgataacgatgcagtggtaaagacagttttacatacgggggattttagagctaataacaagttgatagaagaagtgaagcgatggacgaccaggttagatgaagtctatctcgacacgacctatttgatacctgggttccatttcccatcacaagaatctgtattggaagtgacgtcgaattttgcaaaagatttggtaaatcgtggatttcaatcaattttccaaaacgatcaaaaatccattgttaattacacacatcaatcacctaagttgtacaaattattatttttagtgggcacttataccatcggtaaggaaaagttggcaatttcacttgctcaagtattgggaacaaagatattcatccccgctggtacgccaaggcacagaatgatctcccaatacatggaatacttcccatcaggattgattacgcatgatgtgaaggaatcctgcgtccacctagtgccacttagaattttaaattctaaagattccatccaatcgtacttccaaaattacagcagcatatatgaagacgttgttggctttatacccacaggttggacgtttacgagtaaatgggctaaaaaaccggagttttccacaattttatcaagaatggactactgtaaagaagttttgcataatacccaggatgcattggacataaacttcgtattaaaacaatttaaaaaatatcaaagatttcaggtttttaaagtgccgtattctgaacacagcagttttaaggatttggttaattttggttgttcaatggactataaaacaattttggccaccgtaaatttgcataatattaaagagatgaatgaatggtttgctacttggcagaacatgcggaatgatagtacattttgctaggttattacatacacaaagattacagaggagtaataaagaaaggggaacgggggaaaaattacatatagataaggggtatcaaacggataaatttgctttttttttattattattattccattttcttttgtctaacccagcttgtagttggaaaccagcccaccgatcgtattgaactctgagtccaaatttggatcgttctcaagctgagaaataaataattctgggacatctaaagcggaaggaactctcctatcttcaggattaacttgtctcttataacgcattaggatatttgcatctctggtgctaaatttcttgattaatttcctgtaaaacaatccacaagcattgcagagagttctattaccatagggacctctcctccattcaggcgtaattccttctttacagtgaacgcatgaagtcgttgcttgttcagtttgtcttacgttctcagctataagaagaccttgagtcaaagatcttctgtaattttgaggtgcagctaatgacacttctgttaacgatttcttacgttttttctggaatttcaaatttttagggttcttcttccctggaattatcgactgtggttgtgcttgggattgttgaggttgtgaagatttgaatatcattggcatcgtagtccttccaacataagctgaaggatctgagagtgtaaacctatgagaaggctcagtaggactgggttgagttgcagaaggccacgaagaaattacttgatgttgagtagggggtggtcgagggggtggtggttgatgatgtcgttgttcagggtcttgaggttgcctctgttgttgttgctgctgttgtgactgccgcctctgttgttcttgtggtggtatggcagtcgctggacttgtgggtccacttgggaaacggtaaccatgaaatgcagttctttcttgatgcggcaaattcatcgttagcgattccattggcggtaaaacaaccttgcgtggttgttgttgaggggtgctcacacgcaaatctctttgtaatttcgatgccatattctccttaatatgaggagtttgtgactttaattcaactagctcctccacagtttccttcaacctacaaactacatttcctagagaactcaactgttcattagagaccctatccaataaaattctggagttactgcttgttggtgtagacgataactcttcaggatcttgcactaccggccaatttctaatctcatcggatatacaatttttaagctctatgataaagcttaatttatcctggtacagttggttcaactcgttgtcattctcaacagtagctgccgctctcatcagtgagtccatggatgactgacgtcggcgaccgctacttaaagcgcttccagtagtagtaataccagtagttcttgattctaaaggtgacccctctaaactgctcccactgccagggtagccctgagatgaaagaaattgcatcttggtagatgacgctggcggtgtcaaagtactcctaggatcttcatcggtggcactcgttgtcgtttccccggatatattcagcaaataaggtacactaggaactttggcactggtggaaatgcttctcgaaagaacagggtgccttgtacgcccaaatacgttaccaccttctgttgatccactgcccgcctcctcggctgttggtaaggctctcatagtagttgttttagcagcgctcatcagagatgattataaactaactattgtgttattatttttttttttcctaatggcaatcaaattcgccttttcagcaactaaacgttaaaactttctctcagtagtaaagacacaatcaagaacaaaaaaagtgaaataataatgattgaaatacgacttgatacgacttgatacgacttgacagttcaaaggaatgggtatactggccagcagcaagctcgcagcttcaaacggatggatatggataatatcttctccgttcttgtaggccctttttaccctgtttagtctttagctagttccaaagtaaatctagatattattatggcgacaataccattaccaatatgccagtgaaatgattttatagttgaccactaaatctgagcgcaaactggaaaataggcaattgagataaacggggaccaagtatgcgattgacagttttttttaggtttagttgctcttgtgcaaccgtattcgtatctgtaggccgttcgagccaaatgattccttcactacgtttcttaattggaataaaattcttgagggctctctcctaattaagtacatccatccataagtaggtaggttcgcaggcacatgaacctactattgatctacatttagcgcagcgatccgataattaaggaaggagattgctttagttctcacggctgagggtggccacttgcatataggggggagtcaaaaggaaaggtgagtagattaaagaatccatccaaggagggtagaagcgaatcatattggcagaggattgttgaaataggattaatcaaaaaggtgaagataatagttgaaatgactagcagctatgagagaaagagtttcagcagagatgagtggaaggaaaatgtgggaaagaaccaactaccagcttcaggggagccttcagtgccccatctattgttaaactattttgtcagtatggcttttgaagagtctagcgttagaatggctagggagctgggatacattagtaataatagagaagctgaagagtttaatgaattgtatagggttagggaaagggcacacatcatatctttgatcaaatcaggacgagttgcagaggcaatggaaaggatatcggaagtgttcggtacggaagtgttagaggacgagtctggtgaagaggatttgcactttaaattacttcttctgaacctgactgagatgattagagaacatagacaggctccacctaacggaggtgaagattctcatgaatttattcttaagctagttgaatattctcaacagaaactagcgatgaaggcagcttcgagtaaaacccacatgcaggaattagaactagtaatgacattattattagtaccacacgatggtgaagtaaacaagttaccacggtctttgaagggtctttatagtttgccactaagagctcaagtggcagaaatggtcaatcgtaggctgttgaaatcgatgcattctcatgtggcagaaggtaagtaccctgatttggttggtgggaccggtattaacagcggcagtcgttacaccggcgttttacgtgtaaggcctagggaagatattgcaaaagagttgacgactcaccgtttgggagagattagagatgagagtaacaatcctcataacgacggcggtgattgggcatcaacggctaaattactcggcggcgaagacgaaggtgaacaaaggtttgaagcaagactgatccaagttatgaaattatgggcatggtgtgagaaccaactacatggaggtgatatcggtgtacctagggtagaatcttaattaactatgtaaacgtgattgtgatgatgttattattcccccaaaacaaattcgcacttgattttatcaccagtttctatctttaagaagcataattgaacatcgtccgttgacacaggtaaaagttcattttgcgaattaaagatacgaacgttattaccaatggcgaatttttgtctatcagttaccaattcttcaaaaaggtgagaatctttgaagaggtgatacaaccgtttacgtaacacacgaagtcttgtgccgaattctggtctcttttcattttcatattcttccggtgaaaattccaaatggaacaacagcggtttttccagtagtggctgactttcgatcgttctgatacattgacattccacgtaaagatgagcaacgtggactggtttggcgaagaatttctctttgtcctcaaattcttcgattacgatcccacttttttcatccaagtattccttactatgatattcatcacttactatgaggcggtgtaattttagagattcgtcgatataacctttgttcaattcttcagaagtttcatgggtaacttgggccatcttacgggtcatattaagctcgttaatgatggcaatgctacccattatcatcagaaacaacgttattcgtgcactaatagggtcatgtataaaattctgcacatatggcatacgtgctaaagcatgtaggaggggagcctcgagttccaaatatctgtcaatgatccaaaccatgaaggagagaggggggtatgaggttagggaatgttagcagtggtgttagcggtaaaatcagtgtttaacgccaaagttttgttggtgtacggtaaccttgatgtgtatagtcaaagtgataataatagagtttccctcagaagtgttgaaatttcagaaggatcttcacattacgcccctcgaacaggtgaaaaaattaccaatgacgaatattgatgtaaataatacgacagccttttaaaggcaacggaaaaaaaacagaaaacaaactttggtaaacaacaatatgggtttcatggaaaccatttgttcttgtcattcttggtactgtcttccttcttcatttttttccgattattggtattttatccatattcggaagacatcttttaataatacggcacaaaactcagcaataaaattctccacacatattcaactctaacagtgctatgtgaacctcccctagattcgaacccaagatacaaatatattaccataggtggtaaaattttcattttcacattcgcgttgaaacgctataggctgtaattctttgaagtccgtattcgaggaattcttcttgcaacaaccgaaccgcgaaattggtttcaataatggaaatgacgtcttttttcgtgggccagctgcatctatcgctgcgctttaagccgttgtcccgtaattcgttaacaattgcgtattttctttatacagcatcttcgactcaaactttttacctcgttagatagctaagatggcaaagcatataccacacacaggtgttggcgcagttgtgctcttcgaaaattcgaggctcctaagtaacaatgaaggaaaaagaaaaataggtgattcagaaaaacaaacttttctcggaatattattaacccaagaagtatggtagaaatatataaggtcaccaagttcgaacaattgtagcacacatggtcataatcagccttttgactagttttgagtcaacaatcacagttttaggctgttttcatcaattttctggtaattccacttgcataacccctcacacaaacacataagacgacatgaagtttattctaccgctggcggtcgttgctcccatcgctgaggctcatttaattcagagagacaacattgacccatcctctagaagttctgttaacaccgtttacacatttatcggatctggttctagttcaaatgtcttgcaaatgcaaagttctagctcctctccttcggaaacttcagatagtgcgcgtgaatcgtctgctttatcacaattgttacatgcaagcactgttagcgcaccccaaagcactgagttttctagcgcaagcgttacctcatctccttctaacatgtctgcatcaggctcttcggacgcttcttccaaaaaacacaccggaacaaacaccggtgataaaccttcatcatccccatcatcttcatctaccaaatctgcagctagttctggtgcagctaaccatttggatgtgcctattatggctggtggtattgcagttgctgccattgccatgttgtgatattgtgatgcttttatttggtctgatccattgatttccacgggttctggttgtttctgatagggctagttggactttaattttgttttgttttcatcgtttgtcgttttctgaagccattggcatctgttcagtccataccatagcaccatgaatattctagcatttttgtcacgttcattcgttttgattttatcttccatttgcatccaaagctcttccgatctttacgtttaactgattttactcaattaattattgttggtattattgtccgttgtgtaatctaatagggttctattccctcaataaatagcggtacttgtggctaatgtgcctcaattttttaattgctagctctttatggaaagcatatttgattctgagtacttaaaagaatagcatcttcaattcttgcaggaagtggtactattgagatgctcttaactagcagtggtattactagtggaagtggcattctgcgttaaaaatggtatcctgtattcatatcgctgtgaactttttcctattcgtgggggcttcagcggcttcctccactatcaccaaagggccagatcgagttgaagtatcgaaggctactgatagcgcttctctcagattagatgctgctgaagctgacatgcgttttttctctgtatttctttcagatttcagggttaatatggattcctatacttcatacttgggggcacaccataagacaatgcctcagaaagtggcagactactaccaccacgtagctgaattaccacaaagtgcagatttagaaaaagatattgctgcttcctttcccttttcacaatttcgaacttttatcgctgactttccttggtatagtaccttattatcaagtgctaatgaaagtactatgttccttccggaggattttgcgaccgaaggagcctcacacggtactaaaacaacgaatgttcaaccatattcatcttctaggtccacttcaagtctatcttccactaagtcacactcacacaatggtgctatgagaggatctgactcatcttttccattgcagtttttttccattcctcttctagtgggaatgttgctatgaacatttaagacgttttttcaaccatctcactcagaacactttccactttagagacccattttaaaaattttttatctttgagctttcttttgataagttttttggagattttcaattcaggtagagtagcattcgtattattgtcttctgttttttttagtttgccgtttgtttcgttgttttgttcttgattcggtggagaaattgccgccgatgcgaggggatggacactgtgaggttcagaagctggaataggaatctgagaatgcgttgccgatgcatgaggtgcagattcaggtgactgaggtacctggaactggactaaaggtgcgggtgcggttggcagtattggtagcggtgctggggcgagtttgattaggcccttaggcaaagtaattctgtcctccaaaggtggtgaaggaggatcttttggtcctttgttctcaatagtagacttcacatatggttgtgaggcaagaatttctatcgctggattaaccgccaaacagtttcctgtcgtgattgaaggagcggctattggatcattgaaacgaggaaaaccggaaacgccttcctcagaaaccattttctcaagcgaactagactcctggagctgtacgaggtttgaatctggctctctagtgctcgtaaaaatggcatcagttctcgttaatggtccaagttcttcccaaacgttcattgacatatcaggaaccaactgtgactgtggaaaggcattgtcattggtggctctctgattgagcagtgatagcatgctctgtagaggtgtttgagagctacactgtggaggtgcagctgattgtgagattacaggtggcatatgtgctctaaccactatgagccccaaaccaataattttattggtggcatccgaaaaatctgaatcattgtcaaatgctacttggaaccgtctcatatgtgtggaagaaatcatgtatttacatgaaattgaaggcttctttgcacagaattgtattagtttgcgtccctcattagaatttactagagcgtagtctaatgcttgaccgttgcgtgtcaccttgacaatagtatagtttccttctcttctcacagtaaattgcatttgagcttctgggccaaagcgcctccacttaatcttttccaaatgtcttgaggaagcatttagaccttggggagcgtatatgttttcaaggtatgcatggtagaatttcaacggaaaagaaaactcgacgtccattattcactatctttcttctttactgctattattcccttgattgtatgtcattagagtggtttgtaagaaaataaaagctttaggcggctaaatgttctttttgaaaacagccgccgtcgactgtccggttattggagagtaaatatagggtattcggacagtaaaaagaaaaacatacaaatgtaaaattaagatttaataaagtgaagcgtcataagctactaatattcatgacgatgagtctcttctcagggcgaattagttcacatttgaaaccatcaacaatatttcaatggtgtatgtttatgagtctaagccaatagatacttttgatagtcattttatcatttctggcagagatcaatttgaaaatgatctcttgatcaaatatggattccgtgaatgggggctcatttggttccatacggacaagtactctagcggtcacatttatttaaaattgttgccacatgaaaaatcgttagacgacgttcctgacgaagtcttacaggattgtttacaactctgtaaatcaaattcaattcaaggcaataagctgggtcagtgtaagatcataactacgccatggcataatctacgtaagagtggattcatgaaacctggagaagtatcttataaatctaccaaaaattgtaaaaaatttcaatgctatgagagaaatcagaaactgttaaatcgtttatgcaaaactcgtgttgaattgtatgatgcagaaccattattgcatcaggctaagaaggaaaaagatgcatgtgcgttgttagaatacgtggaggctaatcatgataagctaatcgaggaagaaaagttaagaaaacgggagaagaaattaaagaaaaggaatccagataaagaagatgagttagtcaacgatcaaagcgtttgaatatgaccaattgtccagttggaactagccgccgattgtcgagaacacatcgtcactattgtcatcggtcttttcttttcactgttgaaaaattttcagcatatgagcgatgcgatgagctgaagtacaaaaaaaaagtaagattaaaaagttaaagaaataattgagttggagagttatcatagatttacttcagaagcacagtgtgacgatgcctaagagatctttggagaaggatgaggagcaaagaatagtctctgccagaactgaagctcaagatgcccccaagacggtagtcgatcaagaacctgatgttcaaatggatgaatacggagatcagtacagtgatgatttcgagagtgaagatgatattgtagagcttgatggcaatgatgatgttgaagaagttgaagaaggtgatgataaggattacatcgaaaggaagcaaaaggaagctcaagaagctattcaaagagatcaagaggaatctgccgaaggtaaggagatctatttaccacatatgtctcgtcccttggggcctgacgaagtattggaggcagacccaagtgtttatgagatgttgcacaatgttaacatgccttggccatgtatgacattagatgtcataccagatactttgggttctgaacgtagaagttatccacaatcattactgttgacgactgctactcaggcaactaggaagaaggataacgaattgatggttttaaaactatcacagttatccaagactctggtaaaagacgatacagaggaaaatgatgaagatgatgaggacgatgaagatgcagattccgatccaatcattgagaatgagaatatagcattgaaagacactactaacagacttaaagtttctccatttgctactcatggtcaagaagttttgactgctacaatgtgtgaaaatggtgaagtttacgttttcgacttaggtgcacaaacaaaggcatttgaaactcctggttaccaggtgcctaaaacttctagaaaggcaatccataccataagaaatcatggtaatgtagagggctatggattagattggtcacctttgatcaaaactggagccctgttgaccggtgattgctctggtcaaattttcctaacgcaacgtcatacttccaaatggattaccgataaacaaccgttcacagcagcaaacaatcaatctgtcgaagatatccaatggtcacctacggaatccacagtctttgctactagtgggactgatggatatgtcagaatctgggatacgcgatccaagaagcacaaaccagctatttctacgagagcctccaacacagacgtaaacgtcattagttggaacgaaaaacttggttatctcttggctagtggtgatgacaacggtagttggggagtttgggacttgagacaattttctccagctaattcagaaggtgtgcaaccagtggctcaatacgatttccacagaggtccaatcacatcaatcagtttcaacccattggatgattctgtcgttgctgtcgcttctgaagataatacagtcactctatgggatttatctgtggaagcagatgacgatgagattcaacagcagaccaaggagtataaagaattacagaagatccctccacaactacttttcgtgcattggcagaaggaagttaaggatgtcaaatggcataagcaaattccaggatgtctggtatctactggtaccgatggtctcaacgtctggaaaaccataagtgtttgatattcaaaaattatcttgggggccaaaaatgtatcgatagtgtatatggaaaaacagtccttattttttatttatttcaaagaattggctgttttgtatattattttcatgaagcacatatatagacaatagaggaaaaacatagaattgacttattgcgtatacgatgaagaacatcaagtattggaaaggttgtgtaaatcggttaaccatcagtggtgaaggaggactttcttaacgttggtattgatcccactatgagcaagcacatttggccccttcaaccacctcaaaggttgcgaatcagcaacagcgtagtagatctaccggagttcaataataatgatattctacaagttgaatcgttggcacaggttaatgttttgataatgttgacaccagcacgagtcttagtttacaacttgagaccaatggctttagtcgctagccatgagagaactgctgaatcaattgcagaatttggacctaacaagttcctgacaaggtctgatgccctcgaagaagctgttgagggattgatctctgagaaggaagtggaaaatttaataggacatcagggcaagattatatttcatgtggcaactgagaagaatgctttgctaacttatcagatattaaagaattgcaccaatatgactacttttaaaaactatggtatcccagtagtggacttagctaacctccaagatgaagatcatcaagaatatgacgaaaatttagatgacgacactttgaccgtttttgagaaggataaatcttccaagataattcaaaatggctactgtgttaccaaggaaactggattcctacaattcttaaccagttcacaggatagtacagatgagttacctctaaagaaattggaacttcgacttaaagtggtccttaaatttgattatccagttttagacatgattggatttaaaagactatcagatacaggggatggtaaagctgaagagagtttgctgctgcttttcccacatggtttgcaacaactgacaatgattgatttcaaattaaaggatacttacctggttgagctgattgatggaaaaaaaatatgtattgtccgtggtcaagtaatggtagtctcacaaaatgaagatttgtccatcctagtgcatcgtcttggcatttcaagccagatacataaagatactgaacttcggattggagaaaaattgcttaattgcttcgaaatgaatgggataatggtattagctttcacccaaactattttgtactacgatccggtatcggacaagataggcggtaaatggaatatcgggtcccagatcaaaacgtgtggtaaattgaacaatagtactcttttgattattacacaagcaggttcgataagattctattcacagtatggtaacctactgtcctgcacagcatctgatgatgacgacgatcaagataacgatgagcgccaaagttatgatcactctagtttcacctgtgtggataaaatcctagttattgttacacatagtggtgaatacgagatgtgggatttatgggaagaattgcctcaaactttctcagataatagatttcaacggggatatgctttgcaaaatagtaataacgatattgccatttattcacctccaatagataattcaactaatcaacaatttttgaacactatcaaattacctacatccactattaacaattgcataagtctctttagagtgaatcccactttcaagatgtcagcggtttatgtggcaaataagagcgttttgctgcttcaaaacatggaaacaaattcatggtactgcttcagagatataaccatcatcgacatgcattggttgggttccacatatttggtgtgtcacattaaacaagaagattgtagtcacgtcgtgcgatgcttccgtttcccattgcaggatttagacacttcagaaattgagaagtaccgtctatgggagtacgaattgccatctcatgaacagttacaaagttttcatgtgaatactgccgttaggtacagattacttagagtaaaggctcgcgatggtgaagaagttgacaagtacggcgagaagttctttcgtacagcggatattgtactggtgactagccatcaaatcatggtgttcgcagtgatttctaccatgcactggtctggtctaaatgtgataaagaaattctacgaacagatgaaagtagagatcccattgacggataaaatcaactggattactaaccataaggaaggattggtgtatttgtctagaaacaaactcatcaaaatggataaagaacatggaggttggaggtcacaagtggtcctccgtgacgtggaacgtattatcgatctagttggtgaagatatctttttagtaaagaaccagagcgttctcatctacaaaatggatgatctttacgaatctttaccagctcttttatcgtctcccattgaagatttttatccagtgtctctgacaccagaatccgctaccatacatggcctgcattgcatctttcaacccaactacgtaaaacttgtcattaagcacaagatttacttggatcagatgataaaggctaagattgcactcggtgtaagtgctcaagatatcatgatggaatacggatcgttgaggcattacaattttgcattggaaaaaatattgtctaccaacattttaactaatgagtctctagatggtatattgccactagttaaattgtgtgataatgaaggtacggctattagcggacacagcaatatgctagaaatagtcagtaacagtctgagaaagatagaaacgaaacattggaacattttgttttcgaaattgcaaatgactcccaaagatttattagctaaatgtctcgaaggtaaagacgccaagattctaggtgttcttctgctagtgtttctcaattacgacaagacagattttatggaagatttgagaagcggtgacgacacagtggcagatgtgattgaagaccaagatatgatgctaagtgtcttgagattgctcgttaccagtgcagctaacgctacagacagcacgcttgctgccgattcatgggatatgtgcttccagctgatgcgactgctcaaggccttagacaagggcaacaacaccaatctagtacaggaagcattacaaatgataaatccatcttcctcagaatagccgccgactatcgtcagatcgtgttgtttatcacgtgatcgtcggccaatggtgtacaattgaaatttttcattatttccttcaacaaggcgatcgatggaaggaataacgaggtggaaaaaaatgcgatcctcttgacaagcaaacttgtagcaaataattgaatgattaagggctctatttctgagatctttaattaaaagtttaaggaaagaaatttaagaaatgtctgacgaaaaaggtggctctcctcttcacaccgttggtttcgacccaagatttccaaatcaaaatcaaactagacactgttggcaatcatatgtggactaccacaagtgtattaacatgaagggtgaagagtttgctccttgcaaggttttctggagaacttactcctccctatgtccagttgactgggttgacaagtgggatgaacagagagaaaaaggtatctttgctggtgatatccaaccatgaattcaccgtctaatagcagtggagaggcaaaaaaaaaagaggcagagagagacaaagaacgtagacaaatatttacgaattcgaaaaaatattctaaagctatttattactagtagttaactacatactattatgatattcttctatttgtaatgtgattatattcattgattagcatccatcataaaactttgctttcctacaagcgttttatgggcacatggcgcagttggtagcgcgtctcccttgcaaggagaaggtcatcggttcgaatccggttgtgtccattaagagacatatctttttgcaaaatgcaacagtaatctctttagagtagattcttctcgattcaaatatttattctggctataacaacatccttttcaaggactcaaaatttgaagctataaaagttctttcactcgcctgtacgatgtcagtttgtgaaatactttgtcggtaaacttcttcagagttaccgtcgatcttatctatggaaagatggtgttcagttctttgtactttatcgaatgattctgataagtatccatacttgttaaccctatccaaaagtataccattccatccaacatttgatgcagctaacatatcattaacttcttcatcgccgatgtgccaacatctcgatgccaagttggagatacgcttcaattctggattcttgctaacaatatcctcgagagctctctcaaatatctcctttccaggtttcttaacttccaagtcgtaggataagtagatgtgaccttggaagtactcatagagtccaatgttcttcagcagagtatacataacaggatcagtattgcttactatacccatgatgacatctgggtattgagatttaaccttttgtagaaacgatttgacatctggtagtacttcgtaggccccagatccctcgaatctggttagaatttcatcaaccatctctcttggtgggctcaaaggttggaaaacgccttggatcaatagacaccaccagtcgtttgcagaaattctagtagtcttgccataatttgggtgctgtgatttcaattctttgaataccgttacaaaattttgagtcaattgctgtggatctgcttcaataccatactttttgcccactaaaccatactgttccattaccggtaaagttgtcgagtaaagagtgttgtaggcatcgaaggtgatcactttcggtactggaggttttagcttggaagtccaactaattataggaatccgtttgggccaagtcatcgatctttgtgtgtttctttgacagctatatattctattgatcatcatcattaaaggatcccgaacctttaaacttcatttaagcgctggtcaccactatgcaagaaattctctctaatggccattaaacctatcaacttcgatgctagcggtaaaattggatctagtccactgattcttagtcccatatctgctgtcaaagagcttattgacaatgctatagactcaggcgctaagaatatatacattgatatcgatgaacaaactagcggttctgagtatattagggtcagagatgatggctcaggtattgatggggccggtaggcagctaatgtgtttgaaccacactacttcaaagatttccaacccgcaggagatcgcacaggttagtacattgggatttagaggacaagcgctattctcattggcatctctttgtaaagctgaaggctctatggaagttattacaaagtgtagaaaagatgcagtaggtgagaagtggtttgtcaatggagatggttccataaagaactcaaagattacaagaatcccatatctacagggaactaccctagttctaaggagattgtttcgaggtttgagagctagacacttgaaaactagtgccaaacccttcaagcaaatcggaaactgtaagacgctgatagatcactactcgttagattacagatcaatacgttttcatttctacttgattagtttggataagaatggtttggtagtaaaaagagagttacaacagtctcacgatacaaaatttaccaaaattaagattctttcatcaattgcacgtctaagaaatacccatggtcataccttctttgaagaactaggcattctcattgacaggtctaccaagatagatgtaattttgccgcggatgctgccacatggtggtgaagaagatcttgataatatcaaaaaaccaaagaaatttctctcgtttaatggacgccctctatctttagagctttcttttggtaagagtatcaatgagctgatcgattccctttaccatcagttgcaattatttgaccccatggtatggtacttgaacctccgtagtgttatgaatattggagatgtgaatgttgaacctgaaaaaaatgacgttttgataaaagatgttgaccgtctgctgaataacatgagaagagcattacttggccatatcatgcaggaattgaagctcaatgttcacaaggaatctgttttaaccgctgaggaacagactaaagcgaattcgcattctcaaattaggaggcctttaacggcaggatcaatggtttcgaatgaaggggagtggacgcatactttgttagacgacgatgatattaatgatccaaattcccaggatattcaaagcagcatggacgatttgccatcttctctaacctataactacaaggaaacttcatttgaaaacgaggatctggagatctctaaggaattatctatttcaaacccatttatgacggccaaactgaggagagctttcaaatatggcagccataatcgtcatactaaccaaactcattctctgcccaccaagaggtggacttcatcgccgaccaagagtaaagagaactttatggatggtcatcgaccaatgaacaaggttcgcaaattagataaaacagaaaaagagcaatgtgaagaatttgaccttgggcattctctggaagatactaccttggttagcgccgaggaagaccagaaggatgaagaagcgatacttaagagatctatctacaatttctctgaacttacaaacaatgagactacaacggaaatctttgaaattcctcattattcctcatgtacctacgaccaagaaatgaattggctatcacgtagaggaaatccttcagaatggcttacgacatatataaggtcacgttcacatggtggtgtttacacaacagaagctcgggccaatcattagtttacggagtacgcatatggtttgaatttgaatatatatgaaattaacgaatagcagagataatgtaacatttctacatttaatagattatattgtacaatagctaactacattaagtaggtcaccgtcttttccatgattatttattgtgtgcatttcttgattctaatcaagtatatctatcacttagctgctaaagtaggcatcattcttggcaaagcagaaggcgtctgacacctctatagcttgataagtaccttgcaaactagtgacgaccctgtattcgtatgcatatatatcagtaaccttgtgagtttcgacaacttgaggaattcctcttcctttactaccttcagcttcttcggttctaacgtaagtcagagaaaatggtggattaccttcaaatgtgaagataatttctgcttgatctccctcatggatatcttcgataatattcttacccctagaaacagtcacggatggaagaggatgaaccaaaagagaaagtttttcgaattctttcttcatacttggagtggtgaagttaaccacacattgcgaaatggaatcttcaatggaggcaatagagataataccaggttctgaagcaattctaacaaattgtgaagtatattccttgagcttcaactgcttttggttgaattcatatctgattgagaaaggagctacaccgttcaattgatatgcaacgtaatcacccacacaatactctgccgtaggatctagcaaatgaatcttgggcacatctgtaatagatattaagacgtgattattttgagtagcaatcaaatcatttgtacaaccattagcatcaaccaccttttcaatagtaacgacatgattacccaatttcaaattctcatatagtttatggtaggggaaattagcaggatccacgtcttccaaagtgaattgatcagatctacctttgctctcatgatatatgctaaaagttactgagaatggggccacaccttgcacaaacttcaatttaataggttctaatgacagtgtatcttcttgcacattgatagagcaagttctataggttttgcccatatcagcaaaagtaacataaggtgttggattcacagtttgcttaacaaatacctcttcatatggagaccctgccctggcaaaatcatcttcaccgtaattagcatcgaatagagcattgatcacagccgtgtattcccctggttcctggttgggcaacttgatggcggcatatttggttgcaacttgtatactatcggaggaagtgtagccattgggggcgataatatcgtatcttaaaataaacggaggtgaacctgatagagataaatcaatggtactttctcttccttgacacacctgttccttggaaaatgttatagcagaaagtttattagtctttgcattttctatgacagaaaagtttggtttatccaaaaatgaaaccttgaattggaaattttcattatcaatcttaccactacaataggaatcgtgcatttcaagcaacttataggatccttccttactaactttcaaagagggtttgtaattggagttaaatctcgattcataaactcccaacacttcaccttcgtggtttaggtgctgaaatttaacagtgaaaggtgcctcaccagccaacttgataggaatttcagcaagagagccttgtttaatcttaattgaatttgcgttttccaataagttaaatgacgctgaaggcacatctcttctgactttgatcatcacatcgggctcacttagtccaacgaggcatcctgaagaatcctttacagagacgagggacatgatgtaatcaccacccaagtcaaatttgggcagatttatgtcgtagtcattggattgaatatccttaacttcgtaggtcttcctcttgttggaagaggtttcgaagatatcgtacttcacatagaaaggtggttcaccattcaacttcacgggtgccttggtttggtcgcccaaacataatttcttttcattgatgtttttgaaaacggcactaggtttcactctcattgaagttttgaaagtgtacttttcacgtggaatcaaggatattggttcactgaacaattggttggacaactcatcgaatacaatttcgtaattgccctcactggtaggactataactaaattgattcctagtgccttgtgatgtgtacttctttgtgtcataaagcttgcgtttcccattttctattctgtagatgaatgctctgtaataaaatggaggcacacctgtgaaagttaaatcaaagttcaaacctacttgtccgacacattggtctaaaattggtgtcgagttcacctctagttctggtggaatgggttttgtaactaaaacactcgacttaccaatgactacaccagggcagaacgtagaacccacagaatccaatttataagtgccaggtagatctgcttggaaaccatgagacaaagaatttgtcgatacgttaaaggtctgggcaccaccatcagctgccacatgtgatattttggcccagtaaggtgttgcagctccccaatcttggatctgttcaaaattcacagagattgattttttcgtagatgaatttggatcaaatttctcttccaaagatgctcttgggattccatgaactttgaaattgtaggaaactccattttccttttgcacactttcaggaatcttggtaaagtccatgacgttacccaaaccatctaccaatctatcgatgcgataattgtaaagaccttcttgagtcacgggtaaatccaaactaattgtcactggatgtgttcttgcccatctcagatcctcaagatctccactagagaacatatgtcttggtgtagactgcaaaggtgattcaaagtattctggctgtagattggaatccaaataagtatgttgttgaccaccaactgcctttgagtaacctaatctcattggaggtacaccttgcagttcaatcgtcaatttatcagaatctccaatacatctatcaaagcttcctgcacctgctattgtggcaacgggacagtgtgaaactatcaaatgcgaatggtaaactttgagggagaaattcttggaatctatgattcttttaatctgataaaaaccaatttcgttcaacggaagctccacgtattttatactatttgtatccacgattcctttcatcgaaagatgatccttactcaaaagtgctgatggatcgttaaccactttgaaatctttagcagtcaaatttctcaattccacaccattcgtgtataaatctctgtattccaattgaatcaattggatatcagacgtagaattaattctaatgggaactttcaaatgaccctctgggagtagatctgtgtcttgtggcaaacaataggactcatgcgacggatttagcattgccgtattctctggtaagatcttgatagtcattgcacctttaaaatgagcagatgaatccatcagtttacgatgacttactgatgatccacttagactaacttccttattgttgaacctccatagcaaagtaatagcacctgtaaatatggaaaagtcatgttcagtagagataaagaatgtaataacccacatgcagaggatttgtagaaggaccatccatggctgaaatgtcaatttggggatcttgaaacttggtaggaaatataaaaacatggcatcaactaccacatatttggaaacaaagttgaaccaagagctagttgataataatccaatcactggcaatccagtctttaacaggaaaagatcataagccttgtaactttgaataatgataaataccaatagcgccaaaaacctctgtctggatacatcaagtacttctggtgatataagtggtaatgagctgtagtctacatcagacgcctgctttggtttcttggctttcacctcaggtaatgatccaaatttgaactcctttgatgaattggtagttggctggaaacgtcgttgtgaagtggtaccattatgctgtgttcgatacgaagaagtagcccctatccaatggttacctctcggtgttgttgtattcaggaagaagtctcgatccattacagcgactcaaagtccaaccctggatctggaatcttgtcaatactagtggtattttaaaggttcgaagtgcttttaaagatgtttatagattttcaggttcgttaaccgtgagactatgaaaaatttcaaccaaaaagacgatgagctacaagaaaaggtcgaattattcctgaaggagctcgtattgatactatctgagctctaattcgcattttcaggagtttattttaccttactacaaattttcaggactcaatggctacaaatagagcccaatatggatgagcgatatgctatcggatgggcaatcatacaagaggtcaaaataaagaactgaggagcctatggattgtgatatctagcattaccttcaactattggatatatctctagttgatttccacgatctcatcacatgttaatcacatgggataaacatctcatcgttcaaaggtgcaccttttagataaaaggttactcgcaactcactaacactggatgaatacacccatcaagctggtactcgagttctgaaagctttaacaaccgggcacaatgtctggtactttgcaagcaatatctaaatttgttaagtttataggccctggtattctggtcagtgtggcatatatggatccgggcaattactcgaccagtgtatcaggtggtgcgcagttcaaatacgtgttactctcatctgtcttcatttcaaatttgtttgccgtcgtgttacaatgcctatgtgttaaactaggaaccgttactggtcatgatttagcagagaactgccgtagacatttgcctaggcgactgaaccttaccctttatttctttgccgaactggccattatagctacggatttagccgaagtcgtgggtactgctatcgccttggagattttatttggtattcctttgacttggggggtcgtcctaacggtgttagatgtattagccatcttgatgttctatagtccggatgttggatcaatgaaaaagactagaatctttgaaatattcgtgagccttctagtcgtaggtacagttacgtgctttattctagaactattcaagatttcagtacctaacaaagttgaattgttcagaggatttatgccctcgacaattatcttcaaggatcaacaggctttatacatttctttgggtattttgggagctactgttatgccacactctttatatctgggatcatctttggttaagccaagattacaagattacgatataaagcattatggtaaggtacaagatcgtccaagtttaagagctataaattattctctcaactattcctacgccgagttgatcatttcacttttcctaattgctacctttgttaattctgcaattttaattgtagcgggtgccaccctttacggtcagcctgaagctgctgatgccgacttattatcaatctaccgcctgttggtacaatacatttcacctgctgctggtcttatatttgcctgggcaatgatcttctctggtcagtcggctggtatcatttgcaccttggcaggtcaggttgtatctgaaggatttttgcaatggtcattaccaccatgggctattagaatttgcactagaatgatggcggttgttccctgtctaattgtaactctaaccatgggacagcatggtatatcggatattttgaatttttctcaagtggttttatctctaattttaccaatagtatcagcaccattgatctatttcactgccaacagaaaattgatgactgtaccaaaatcagtggatgaaagacaagagcctggtgaaaacactgcactaatttcgaacaaagaagaatacgtcgatttcactaatagcacttggctcacagccacctcagtgatcatttgggctcttatcggcagcttgaattgctacttggtaatttctttcctacttggcgctgatgttcatttttgaatgcatatatatggatacagatgttacattattagttagttaattttttttatttttttatgttctattctgtttttacaccctcttgtgttttctctttcttgttggttgggtccttaccacaggtacactaccattgtaattagcctgcagtactgggaatgatctgcaatgattcatcggcagtccagaagtctgcttggccaaaataacttctttcattagacgtcttgtcttattataaagtctcgtctcctccacagatggcttggttatcttattctttattctagtcttcctcatcttttggatctgtaaaagggtattggagattaattgagactgtgatccctccttgaaactggatatggactcttcgtccaaactattagctggagaccactgcaaaagattttgcaatttaatcactggtggttcagaatcagaaacttcttgcggcttcccattttccgaaggtacatcctttgaagcatcatcctcttcagcaggcttagtggtttcaggttctttagattcagaatcgtcagcctcagactcttcctttttctcagttttgtcattctgttcctcttctttttcgttttccttctcttcgttgccgttggaaaatgcctccatgtaacctactctttccaaccaaattatcccttttgtggtggaatctatcactgtcccattttcgttgaacgaaggaacccacgatttgtagtcaccatattctaaccacatcgttgtaggtaaagcataccaattaggatgtaaaaatctcgtcatcatttcagtggggggtaaagtaggatctggcacattactagtgttggcggccacgaatcctagccttggtgcatcctcacacatattactctggaggataattttattgatttcaaagttgctgttaggcaactcttgcggccttctatcaaggctagacttacctataatagaggagaaaagttctgattctttcgtcttgatgtgataagtcttagcaataggtactttgtaattagtggatatcttgatgaaatctcgtgctactatcctatctagttcagttttctcctctggcttacttgcatattcttcaggatcgatttgcatcaaagaaacccccactctgtaacattctcttagcaataattccgtagcgaacttactaaacttgtccaccatttggtaatttctagttccttgagggtagtaatgaattaacatcatacaaactaagtttatatcatggtataatctgtaaaatccaccgcgttctgctgaatattctcccgtttcaaattgttgtgaaattgttgtcattgctaatttatcctcatttttgatgatcccttcattattactcctatttttaatgaacttatagtaagaatcaaagattttatctgggttagggtcaaagaatttagctgggaaactttcatccaaaaccttgcatttggaggatgctctaaaacattagattaaagttagtattctgaacggttcgtctggaaaaaaaaaggggaaaagaaaaacatacactttcaaaatagcatgtatactggataatacctccgagaactctgtcatctttggcggcgtatgcactattagttccttattatcatttttagagatagttgaacttgactgtttcttgagctcatgccgaaaagccatatgagcataatatcacttggtacgggtacatagaagtggtattaaattctatattatattgtattatactatattatatttatctttatgcaggcggctaattttccccaatcattggttatgcttatttctctcttcttcaaaatttttattcgtaatgaattttttcactatccattgaccattctctttaacctgatgaacggctatagggttcagatcccaagaaatactcaaatcgctgtccaccgatgacccaaatcgaggaaccacgtaacagtacctctctttatgcgacacggtaatagtatttagccctttacccgtcaaaggtttactgtaagtgagcaatgaacctttgccagcgatattagctaatggtgtactcttgatgtcacataatgtattcatccttgtacggctgctattaccttgatgtagggaatggaaaactaggaactttggcggagattctcccgaattggataagacagaagttgggtgaatgtatacaaagttttcctccatttctggtgatttgggtgccagcacattaacatatggaatgttgataatggtcatcttgttcgttaatttaacatcttcggggaacaaataatccgctcttatagccacttgatcgacaaaaccagcacagatcatttgtttcaacatcttcagttgtaattcagtcggcagatctgatttaagatcttgatcaactacacgagcggcaacgttctcctgagtagtattagatttaatgatataggtgagttgcttgcgtaatttggcaatttcttcgagaaatttggctctcaagaaattctgacgcataaatgacgccttttctttctctggaatgaaatccagggcactcaccacgcttaaaagacggaatacgtctgattgcttgtccagtttgctaaacttggctttgctcttgtaataacgttgacgtagcagtttcttttgatcactatcttcctcttcactatcagaattttcaaagtccaaaccaatttcatgctccttcaagaaaggatcaccaactgaaagtgcactcacgatggagatcgcataaggcaaacaattatgttctgtagaaaccagcaaaatcttcgaatatcttggtgaaagagggaacaaactcattgttttaccatcctctgtaattttctctctagaatcaagagctcccaagtattgcaaaagtttgacagctttcgataaagttcttggatctggaggagtcggaaatgggaaattgatgacattttgaattgccatacttttcatctgcaataccacactttcgactggcattcgaagaacttctgggcgtgaaaactgttcaaagtcttcttcaaaaacagctgaagagtatatgcggtagcaatgaccaggtcctgtacgacctgctctaccagatctctgatctgcacttgctttactaatccaattaatttcaaaactttgcacaccattcgattcattgtaagtacgctccttggatctaccacaatccaccacatatctaacacctggaatggttaacgaggtttcagcaacgttagtcgccactacgcacaatcttgaaccggcagggggttccttgaaaattttcatttgctccttcgttgacaataaagaatatagcggcagaacataaagcggatcattgggggtttgattttcctctaatgtctcttcaaaaccttcttcctcttcctcttcctcttcgtcttcacctctatcaccttcgatgtaccccatattatcttcatctacaactttgacgcttaaatctatatcttcggcctccaagtccacatttttagagctaacctttacattagaagatgatgactgcatatctttcctgccgatattattggtgtctttggggaaaggaaattctttcctgagctttttgaccatatggttgatttcttgttgtcccgtcaagaacactaagatggcgcctggtggaagcctttgatgaatcttgcaagtctttttgaaagcctcatcaacataattatagggagtacggcggttaaagtgcacagatacggggaactgccttgcctctacattcaggactggaggtggtgttgagaacagtgaaagattttcgctaaaatcagcaaccctcaaagttgccgacatgataaccaacttaagtttcttattttgttcagggtttttggcatgttccctggcacgcagctttacacaacggctaagcataccaataagaatatcagtattgatatttctttcatgtgcttcatcgataatgatagatgaataattagacaatttaaaatcatgcatcatttccctgagcaaaacaccgtcggtcatgaatttaagccttgtgtcgtctttgacagaggaatcgaaccttatttgatatgcgaccttgtcgctgtgatcacccagctcattagatatacgattagccatggccactgtagcaactcttcttggctgagtaacaccaatcataccaggatggtcaggagattcgggagatccaaatccagattcgtacatgaattgcggaacctgggtcgtcttacctgaaccagtttcaccacagacgataactacatcattatgatgtatagcttccataattttgtgttcttcaccaaagacaggaagctgcattctaacggcctgaatttcttcaggtcttgttactggtacataaaatgccttcctcttagaagattcatctatgggaacatcttcagaacctaatccatcatctaaatcttcctccctcacaattggctcatacttgaagtccaatgagggcatctccacatcaacatttcctccatccatttctcttatttgctcattagcccattctttgaaagtatcagcggttgtctgtctttccgctgcaagttcttctggattgactggttcactactctcgctttcgccatcagagctttcttcttgatgctcttcagaactatcagatacctcagcgttctcctctttatcaacttcggcatgttcttgcacttcttcttcgtcatcagctccggagtcctcgtctccagagtcctcttcagaagacttatcctccgagtcactaccactagacgcaaaatccatttcatcctctataccatgtttccttttctcttccatttccactagtgttctccaatgatattttttcttaggagccttgtgtttatggactactttagcattcgcgaatccaaatcccataccagttccttgcgcaggcctaaaatctacaaacgccgattttctttcttcaccttcaccttcaccttcatcttcatctccacttttttcactttcatcttgctgagcatcctctggatggtcttgaaaccaatctttctgatcatgctcctcatataaaatttccttcgtatcctcatcacctctgccttgcctctccaggcttaatgcttcttcaaattcctccttcttcgtctgcttaccatgtcccaattttttagaactggtcaggagtgaagtatctatcttgtagtcttgcaatttattcataatatcttttttttcctctttcctcaattgatgctctatgaatttatccagtcttttcctcttgagcctagagacctttgtttcctttggcgtgaatagttcttgcaattttcgcttctttaaagctttctcctcttggctcataggcggcagaatttcagcattagtatctggcccttgagattccttagatgcctccggcacctcttctgcatcttctgcatcttctgcatcttctgcagcccttagaaactgtttatttctaatttttttcaactcatcctgcttggctatttgaccagctcttgccttttcgttaaacctcttcctataagtacccataagttgacactgagaaaaataaagtggtcaaaccagtacggaaattccttggcaataccttgaatactctttttccctactcttcactatttgtttaaagatgcgatgagcttgaaatttttcagattatcgatgcccaaaaaaaaatacttcaacataaaaggaaaaaaagaaaaagataaaaattgaaactataatggaacaactggggaacagagaaccataagctccaaaaacctcgagtttggatccgtgtcaatcgatttctggatgattttagctaatgtcacatgatggtgaaggtctttatgggattttgaatgaacgaaacattaaagaagtccaatttggtgttgataagagatttccaacctggtatggtagtaatgtgtattttgatcccgagagtagagctttaggatatttggagaaaaatggatcggatggattgagtggatcaaatgggaccaacggtcataataaaggtgatgtccaattttggctcgatacactttatgtatgcgaatattgtttcaaatacactgacaatgaagaggatcttgctggccatgccaagcattgtagattccaaaaacattcacctggaaaaataaaatataaaagtccgaattataccatcaaaagggtaaaaggaacaaaacatcgtctattttgtcagtgcctatgtctttttaccaaacttttcctcgacaacaaatccatgtactttaaagtagatcactacgaattttatatcgtctatgagacttcgtccactaaaccgatgggatttttctccaaagacacggtttcttactaccaaaataatctggcctgtgttctagtttttcctccttatcaaaggcgccaattgggtacatttctcttagatttttcttacaaaatatcaaagtctgaaggtttgatatcaggacctgaatttcccctctcaccatttggattaattggatacgtgaaatattggtctttaaagatatgttgggaattttctgaaggtgaattagctaacatggagaaaattaccttagagaatatatcttcagtaacagggtttcgaatcagtgatataattactgctttaaagtatctcgggtgcttgggagaatctgatgaaatttatttgtctatacttagaaaaaagctgaacagacatagctgtgaggctctagtagaagatgagtatttgctgttagacgattaaattatcttgtatagtaacttgtgttgtaacttttgttttatctccttcttttttattaataaatatgtattacgtcaatgactactcaaaaagcatttgaatctcatcaattcttctttttctcctttcatcttcatctgcgtccatagcttcaccgatagtcctctttcgttcctggatctttaacatcttttcttcaattgagttttctacgatgaatcgtgtcactttgacctgatttatttgaccgatcctgtgtattctgtcaatagcttgatcttccatgctgggcgaccaccaaggatccatcataaatgcataggaggcacacgtaagatttagacctacacctcctgtcttgagtgacatgagtaaaaccttttggttgtcgaaatcttttgtcgaaaaattctcgagtacagcggctctctccttcaagtttaaccgcccatcgaatttgtaaacttttaccccattgccgagaaatgtattagctaactcagtctcgagaatatccagaaatgatgagaattgagaaaatactacgatttgttcaccgggtgaagtctcctgcagtatgctacagtgcttcaaaagtgcttcaatctttgctgatttagccacttcacggagaggaaccacttgaggtgattccccatccttcaacatcaaagtgaaaaaataatttttatttacaggttcacgacagttggggcatttcaattccaattccttttgcttttgaaattccaaatattcctttaaacattcttcacaaaagctgtggcagcattcagtgaacaacactttatgcagttcaattgggtcagctgtacaaattgaacattctaatgtcttcaacgaatccgcagtagggtacttttcttgaattctagatttaattgtattcaaacgaccagaatcgagtcgatttgaactttcatttaacccgactttttgatagactttgttaacatccacagactctttgagcaattgattcgacttggacaaatcttcatcattttcgtcttgtgccccaaggagctttggatcacagcatatctggcgaagccttagaatatgaaccaagatggtggaatatttcttcaaaaggtcaccacgggctaatccttttttcaccgatgtttctgcttcctccaggtaatgcttgtagattgtattttgggcttcattgaaggtgagcttttcaacgaccacttcctttggcggtagctccaccagtggtcttccgtcagcgtcttgcatctgtttagttctcctcaagaaaaccggttccagaattgcattcactacatcgaaggcctgtcgataatcttttctttcgaacggatcagatacaaacatcttccaatagcttatttgtgcccatggttctaatttcaaaaatttaacaatgctgtaaaggtcatcaagcctattgataatcggagtccctgtcaatacccatctgcacatactagaaatctccatgacagctttggaagttgaagtagtacgatttcttataacatggccctcatccagaatcacacgataaaacttgagagaaaataatcctgtggtagaatccatgtcagcatctctcctatccatctttagaattctagtccattcattttgcacaataccataagtagtaagcacaacggtaggagggtttttggtctttgttaataaagtcttcaaactgctaacgttacctccataatatatttcacagtagagatctggagagttattgaattttgtgaattcgctatgccattgtgataaaagggaagtaggaacgatgaccaaagtagtcttcatggcataaggtttttttgatgattgagatgatggcggagataaattctcgtcttcattaccatccatgaaaagatgcttatctaccaatgaagaatcatatggtgaagtgaatattagagataatgctgaaattgttttacctagacccatttcatcagataaaactccccctttcatcatggtttttaaaataggcttttcaaggcaaaactctcctgtatgcaaattagcataaaagaactttcctaaatccacctctgtatggtcttccattctctgtgctgtccatgacatgtcttttggccatttgaaacatttccatagtgggttcatcatgtttccatttacattttgaaacccttgagaatctgcagccttttcaaattcgtgctcccttcgaagcatccatgttaagccttgtctttggtatttccttaaagtgagattgattgtagtacttggaggttctgtctctggtaacgttttaagggaatccgacgactgagtagctttataaaacacttttaattgattcaaattcataacaccttcctcttgggaagaaaatctacgagcatcatcctcttcacgagcaacaatatcttcgagtttttcatccccatcattatcatcatcatccaaatcaataacttctacgccatcttcttcactatttgctgaacttttgcttgcatcatctgccttatcatccacagttcttagccttagtctgtcaaaaagtgataaaagacccactttttttgaccgactttgtaattcttcctccgtttccaccattgaactattgctcccccatctggcagaccgtgatggtgttagttctttattctgatcttcatcgaaaatagaagatgtaaggaaacagtcaagttgtaagacaaaactatcacctatgcttaatcttttattttcacagaacaccattgtagcttcaaagaccacatcatcagtgtttatcaatgggtaaacaatttgagccacatcctctggtaatctgccaatttctcgattttgctgtgtatcaaatatttttacgaagcttgccattgaaactttctttcgaccattggtgttgtacagcttagatgtaggtagaccaccagaagattttagaatttccaattcagttccatattttaaaggtcttaaagtaggtcttgtagccatagcattcacttgtaatgatccgataaattttctccactcaatttcacttttcaatctttttatgggtcttggtgtgacttctttgcgcctcttttctctagttagaggctggcctacgaggcttccgtttctgctatttccattgctattactctcagccccttcattgccgcctgccgtcggtgagctactgttcctgggtttctcatgttccactatgagtccttcttcgaaatattcacttatggctttagaaaccacatcgccttcgccccggtatttttctactaatcctctggctacatctaaattcattcctggaataatctgcctaatttgacttatgtaatcaggggattgtagttcgttagacgctggctcaaattcctcttgtaaactttcatcttgcaaagtttcatcttgcaaatcgttctgagactgactatctgaacctgcagatgtgtgtagtccggattccgatggcactatcggtgccgccggttccactggttcctgtccgttagatccaaataagaacgatccaccattcaacttgaactcatgtctctccttttcctgagatgaatcaaattcgtctttgaaatacctttcacgctcatcagccatcgtaggcacttcagggcttcttgaaaactaccccaataagtcgcatttgattctacttcatctcaaactcatctcatttcttcatgtagttaactgtcgcgcaatatcagggtaacgacacacgataccatatggcgctcacatagaactccgaatccttcttaagtggaagacccggagataaccagtttcagcatcgactcttcttcttcataaatgttttgacactatacttcgttctgctttatttgccgttttgaacaaagccaagtttcgatttgccgctttccgtctattgccagttcttgtatatgaagagtcttacaaagctttaagctcctacaaaatgttcatcccaacgctctttaagtttataatcattaagttgtagcttattttatgagcggttacacctcgtataagaaaggtactcctttgtttacttcacggtcctttttatactacccgccaatcaatattacccgctctttgattgaccgttaccctgccctaataatatcaacatattaacgaattaatcaattagcatcatcatcactagacccaacgtatatagataagattgcataagctgctatacaggaaggggtcttggtcacagctagtctttgatttgtgtgttggggatttctttgtctcgcttatttactggataagagagaagttgaaaaattgattagaaagagccctccccctgtaatgaacagtaactgtaaaaaaaggtgatgcccattattgatttcgagatatggaaactctggctttttaggagcataaaagctatagttataattttcctcgttggattttctattgtattaccggtagattcaattgttcaggcagctgaatcttctaatactgccctaaacacatttatcgttgtaggtgcgctggttgcatttggattggtaagtataataattattgttggaagaattatattttgcagaagttgtattcaagatattccgcgtcgatatctaccaattacaccaaatgatctgccgcatcgcggtagtagaaagatgattatggaaaatatggaaaaatctaaggaattaagcatactttttaaaaagccaaaggaacccgtaatacatgctggattggaaccaccttcacgttgtgatgatccacgttatgaaaagttatttcccgattacctaaactatcgatcctgtatcaaaagtttatcagataggttgaaatatcaaggtattttcttaaacaatatgaatatcgatatgaaattaggtgagacttttgcggatgtggttagtaatcaatttaccagaaatactcgaaacaaaactcaaattgacaattccaaaaagtttattgatttgtatgaaacgattagatattcgggtagagaagttacaagacaacagtttattgatttcgtatcgttagctatctattttgtggaagtttcattgactagagatgatagatcaccagctttaggcgagttgaatactggatctcaacttcaattcaattttgacaatggaacttgggaaaacgatgtgtccaattattcatttccgaacgatgcttattctaacggtgcggattactactatcctgaaagcataaattatttgaagagaactaattctacaagtactgtagctagaaaagtaccttcatttgttcctaccaacccagaggaagaacataaaatggctctagacccacaagacccggtatcgcataaacctagcatgcatacattagccgacagctttaagtatgtaactcatagataattataataacagtaataatagtaaccaaaagaaagaatcaaaagaactttaattttactttaaattttgattgttcattgctaattagagcttatgagtctcgtctatccataggagcaattggcgcttggttggagtatgtgaaatggtggtctccacaaagtccctcaatctttcctccgaggtacggtattcatccacgtattttctcaatatacttttgaaaaaactcatggtagtctcatatttccatagcaaatctaatttgggcaaatcgttctgccaatcgatctctatattagtgtcattgacatctggtatatttaccgcttcttcaggttggagcgccaattgtgttatgcattcattagtaatgttgatcaatttctcaaaaatgaatgtaagacattcttgatcaccaatgtgttgagttaaatttctaaaagtggattcaatcgaagttccatccacaagaccataatttttagtactaccgccactcttctcttcgttaaatgaaaattggaaaatggataatggtgatagaaaacctgcaaatttgaaagtatccgcgattaggaacccattttgagagttagagttccagaatctcaaaacagcctctacaatagtgaattgtttagtggaatcatccatttccatctgacccaaaatgtgtgttaaatcatctttcaaatcaccaatgtatttgttggcgtgtgataaagacctactaccggagtgaaccaccgtttgtattaatacaacgatgatgaatttctcaaaattggcaataatatcaccatattcttgccttatagaattaatgatggtttccaattcagatacttctcttgaatcgttttgcttatgcacataatccagcaattgacgaacttgctggtgagcggggaaagattcatgtctaaaatataaatcgttcttcttaatatcgttgggattaacttgaaaactctcaccaacaaataatgattggtaatattcgactaattgttcacgaggcacgtaggaactatccaaatattttttaaattcatctggtaaactatcttccacatccaatgtattagaagtcaatcttaattccttacgaattaaatttttcgcaaaattcatcttggcgttataaaaagtggaaccaaatctaattgaatcattttcccattcgttccatttccatgagaagttgaaattactcatttgaatggaaaaccaatccaaatatctcaattttaattctaaatccaaattgtccaagttgttgtagaaaaatctgaatgctctaccaaaaactggggcaatggctttgggcgaattttgacaaatttccaccaaaagggtatagaaatatgcaaatggttgagaaacatcaggtaatttgaaaactaattccaagatagtttcgatggcaatatcttcaattttgaaagtggacgccagtggattttcttcataagtggcagccaattgcgcaatagattcacctggttctgcaaagataccctgtttgaaaaacagatcaagtgtaattacttgttttgccacttcctttctgttaaattctaaactttccacaatgtcaatgataatatccttaaacagttgacctgcataactagtaatggggacaacagtttcaaagtcacccacagagttgggcaaatagacgtggaaagtataacgaggttccctccacatactgtccactgatccaacacctctgtctagggaactaaatggtttcaattgtcctaagggtgggagtttcaatggttcgttgaaaccatgtctttctgaaggttgttcgctcaacaaatattgccagtctgggaataattggaacaactgctccatgttattggctaaaacctttttcacattgggtaatactacgtgaatcaattctgtagtttgataaggtgcatttttattaaactgcttgagaagattaacgtctgaagttttgacttgatattcggtttccacaaaattgaacagttcctctacttttgattgtaaaacgtcatctgatctgttaaagaaaaacaaatatggtaaatccagtaaagtatttgtataaagcgcttctgacaatgcattacgagactcgggaccagcatcacgatttagatcgacggctaattggaaaacggacttatagattgctaaaaggtcatccgtggaaacgattggtgacaacaatgaaagaaatcttaatactaatttaaatttattccaaataccagtctcgtttgaaaccgcctcgtaattttcatctgtgcttgcatcacacagtttttgtaattcttcaaagaaaaaattgataacacttttagcggcaacctcattactagcattaaccaccatagtcaacaatgcaattgcaggttgcttttgaggttgttctaagacaactgcacggaatgtcgatagtagagcgtcgttaaagtagtcctcatggccatattcattgacaatggcatcacttaaaaatttgatatcttcttcaaatgccttaacagattcaccaatcgtacgaatatccggcatcatttccttacataattgaaccaccggtggtaccctctgtctctttggcatccggggtctaaaatcacggtatccatcatcttcctcaaaatctatagtcataatcatttcaattgttagtataaagttaaagctatttgaattgcttatggtccttttgccagaaaaataggaagggggcaacaaaatcagggaaccgccatgatttatattggatagttccaatatattcaacccaatttaataaattttatttcgattgacacaaaaaccatacttttattttattatttcaacattttattgatattctcttttttctaaagcgacaacagaaaattaaagtttgacaacaataaacagtcaaattggcaaaagaatcacaaatacatcaaattagtacataccggctcttctcttcttactaaacatctttggcctattctccttggatcaattgtaggctgtattaccgattatctcttgaaatgtaaggtaatttaaaggcttttggtgataaagattagagcgctgattttttttctctcttcaacctgtttattatcataatacacgaatggaatacaaactgcattatattggtattatattatattatattattttgtataatttgatttgatttgacgttaacttcagatttacagcattaaaatggctgtggctggtattccctcaatcgacttatttcgtagtctttcgctgttagttgggattcgagatctgtaatcttatgcacaaggtctgtggaagttggtttagcaccgttttcactgagaaatatttgttcttcggcgattaatcttctcaacctttgttcgttgagttgtttcaataaatcaacaattttctcggatttggttctcaattgtgcttcatagtccaagagtgattcaccactcaaaggtttatcgttaccatctctattggtggaaattgtttgcagtttttcctctaaaatacattcacgtttgatggaatctgctagttctgccgagatgatagagatttccgacataagtgatttattttctttcaaaatgttcaattgatcagatgaaacgatgattgttttaaacctgatctttggtggtattagttcagaaccatgggcaaacataggctcatatggttcacccatagtgttatcgaaactaaaatgttccatctcgccgtcctcttctttcaaagactctgggttttgttccgatacttgcttaacggatgacccctttgtcactttgccagatggtactgacttaacagatggatttctatctgtatttgcatgtttaaaatcgaaagtgtcatcattagagccgaggaaactacccatactcacattactgacactatttcttgaaaaagtccgagctcctgaaccagactcattttcccttgaagatgccgaaggaattttagatagaggttttctattaggtccattacgactacggtccactggggtatcactgtgcaactgtccggacatccttgcattggaattcaatgtagctgtagtattgctggcagcaggcgacatgttcgatatatctagtgtagagttaccttgattagtgttcgcatcatgtccaaaaaattcttcagcggtaaagaactcgttattcccagtattttccaattggtataaaccagtagccggcttatttttcttctgtggagaatcacttagagcggacatgaaagttgatgtagaaattctgttgttttgaagatcaccaaaactaattgtagattctcggttattgtaactagatggatttttgttgtttttcttctccgttttcctctcccttccattttcgctctctttattatcggctactgattctgattctagtttatcatttagagatagaccatcgaggcctctttctaaggtagatgaaggttgcaaatcaagtccgtcatacgtgttacaacgactcagatcttgtggtggtagcgattgattttgaagtggtacattagatgaatattcagtcttcatttgttgttgattttcttccgaaggccccattagttctctttgctcctgcttttgtaattcttcttgatcttttctcagtcgttcacgctctagttcttgttccttttgtttcaattcttcttgaacttcagcttcacgctttttgaccatttcttccttttctttcaattccctttcacgatctgccaattgtttttctctttcctttaattcattctgttgtggttgtgacaactgtaacacgttcaattgaccaccatttattggtggtgaacctggtgatggtgcaactaattgatttttcaaaggggaagttacgttcttggattgatcattatctggcgtcaatggaccaggatctaaactttgaggcattgggggatttatacccaatcttaagtttcttcgaggagcaggggtaggattggaacctgaacttggaccagcaacacccggcacaccagaaactggtgcagcggtattgggagaggggccaactgaagaggatgaaggtatatttattaaagaattggctcgtccgcctggtgggggttcattatctctagcggcaaacatattttgttgatgttgacgcatgtaccccactgaaggtctactttgagttgtcatcattgacatggaacgtggcataccagaaggagttcttggattaccaccaaaaccgggacttgtgcctggataaacaccaggaccaccaccaggacccattggattgaaagggctacctctaccatatccttgtaatgacattgctcttggatcggcacccgctgctggaactgcaccaactggaccgggttggcgttgttttgccatggcattcattgcatttttcctctgagcagtcattgcctttcgatattctgtattgttcatattattgtgactcttcgtaattaaagtaggaataatgggagcagtatcggctccaaatccatatttttcacttttacccatcgtacgaatatcattaaatgtaacatcatcttcactctcttgcattataacttcgtcatcttcattaccgccactatttctcttcttgttattcttgtgagaaattcttggtctctgcctccaaacgttgtttaaggaataagctctccgctgtggttgttgtggttgttgtggaacaccaacaggtggcatcccgttgggtggcatcccgttgggtggcatgccacccattggaggtccacctctataaggcataccgttttgcatgcgcataggcccgttttgtctgaatcccatgttttgctgtggattcggatgtgggttaggcatgggagaaggggatcccattggcgtgcctgcaggaactccaggaggtagcccaggaattttaccttggcctacttgagccatctgtggtacgtatccgaatcccatcggtattggttctctctgttgccgtgctctattaacatcaataccatcatcgtcgtcgtcgtttacatcaatattattaacatcaatactaccgtcagtctttaacaattcactccttaatagcccccgcgaccttaccatattatattatgtcttttcggatacaagatactatgattacttggcttccttagaccaattctatgcgtctaaaatccctttgttgtggttcgttaacggtagtttcatttcttcgtgtttgtttttattcttcgccattaaaagagaaagctggaaaatgtatgtatctatatacgtggattaaattctttcagtataaaaaaagaacaaaggaaggagttctccagatcttgaatgggggtcgatcgactggcaacaattggctgtgattctaagtcttacgagatttagtacgacgtgtgttcgcactactggctgcagcggtggttccagtggtacgagattcctgattagctttcttgttattgttcgtgttcttttccttcttgtcttcttgctcttcttctgctcttgcaccgttatcttttgccaactggtcgttatcccttagaggttgatgcttcagctcattaatgaaccaggttaccagtgcccagagaatagctgctattgtcaacagagcaaagaaatggacattacgagtttcgtaacatagccatactaagactagaattaacgaggtaaaggaaagatgagtagcaatgagcaactgaggattagtaccgggttcgaagatactaccccaaagattctggaagaacgacatggctttcttagactattagttcagttggcaatagttctgcgatgacgttgtaatttttcacatatatcggagtttatctgtgcgggtaacagccgtggtatcacagtattgtaatgtagcatgacaacgtagatcacagtataatgtaaggttctatctattccatgtagtgatgtattcaactaattcttcttaaagaattctaaaggcgtaagcatggtacatttttctctatattcgaaataaacaaataaatttcttgtaaatttctggtaaattaacgttttgtagatcagaaatgcgaattcagtatccgctttaaaaattgaattaccaactaaggttgttctttgatgtttaaccaattcacaaaatttttttaataaactagataatctacatgtcagcacagcatgcttattctaccaaccttgtaatatgtaacacatatttccctttttatagacccgaacctagtacaaaggaacctacaataacagcgcccaatgcagcaccatatttccatgacaatgggttagcgactagaccagcacctgctccgttttttatcttggaaccatcactcacggttggagtagctgatgaaagagaaccagaagatgtattaaatcctgataggcccccggcagtaacggaagatggtgctacaacattggaatggacaaggcggctgttagtagtaatactagaggagtttgaagtcaaattggaggtcaaattggaggtcaaattggagccaattccagacgtggagttagaaaggttagagttattgagggaagagtttaaagacatgactagggattgcaatgtttttgagttattgaatgttgtcctagagagctcgatcaagattttgtatcacaaatgcatgtaaaactactcctatatatacaatttcaattgaattgaagatacacggcaaaaattggccaaaacaaggcgtatctatttgctagctaaccatagtgggctagatctttatatcgattgggggttatagggtctagttctaactccaactgtactacaaacttggttatagttattatggctagaaccactgcacttcgagatttttcgcacttcacaccgcgaaacgcgtagttcacgaaaacgaatcacgaaacaataaaagaaaaagggttgttgtggtcaacgaaatctggagaacattagcaagaatgcttcagggtccagttgtagatttcgcaatcaacgctggaggacagttggaatgtttctatagttagtgaacacgaaagatatagcaagatatgttgtccaatcacccagtatggtaaaacaagatacacggcatacgattttcgaatactccaacctcccatgaacatgttcgaagaatagaaaatcgttgcgtacgttagttttgatttaagataagatagacaataatcatcttatcggatacgagtaaaaaaagaaggaacaaatacagaataaacaaaccgtactactaaacaagcctctaaagaagaatgtaaacccaatagttatatactttctcctacactaggaaagcagtgaaatataccgctgtcccaattaaaaaaagaaaaattttaacggagctcaattcatgtaagtgaatgtttcaaatcgtgttaagaaccagtgaagttaggcagtttccaggggacaaatactatatgaaccgcttgtgctatatagcctatagaatccaattcgtggtgcaataacaaccaataacttgaactagaacaagaactcagcctactagaattcgattcagtttagtccatgacgtagggggaaacttattcaatgaattgatgccatttgaaccatcctcaatggatatgcttgacaactttttattattttgaaggcgcagtgagacaacatcacatttgaaaaaaaaagtaatagcagcttctactagacagtgattaacatctggatcaaaaattcaccctagcgttggagtttttaccaatcaaacccttaccaaccaaaattccagctctattcgaatgctgtgccactttctccaaagctcaaacaagaattggctttttgacttttcgaagattccaatcatccggtctagactgaattcacaaagaaaagacttcatgataattgactgagaatagggaaacaagacttgatctcaaaacacttgttagggatcaaaatcaagaagcgagaaaacgggaaaaaaacagaaatggtcttcatatgatcatcttggccctataccacatccgagaggactgacacctcaactgtagttagaattcgaactgtatgagggcgggctggtattttattgtctatggcccgtttgatctaatgaagtgacacgagacctcttggctttagcacccggaatccgtagtagaaaaggtgaaaaggtctattcaccatttcatggaccaacagagcatacactataatcggagttgtgcttgttctaaatatcccgtcgcagccccatagagctgctaggtataagaagctcatagtagatactaggttgtagtcatctaggtagattgaaattaattaattgaagaaagcatgatttcacacgatcgatatggcattatccaatatttcatactcttgatgcataatggcttgagagataaggaaaagatggtcagcgagaatcatgcaactacatcaatgcactagattcttggtttatgctctgttagacaattatatatataaagaggtcttgttcttggatgataagtatgatactagtaaaacgattgcttgattcgtatctttcaaccaaatcttttgtagtaattatattgtcagatacatctacacggttgtacctagattttcataacagcggatttagctcagttgggagagcgccagactgaagaaaaacttcggttgagttatctggaggtcctgtgttcgatccacagaattcgcaatattttttgaatctaataaaagatagtacgagcgttcgaaattatagaacggttaagccatgccatgcgctattaggcaggcatccgtgattttacgtttttaaattcattatcaaactggtgatttagtttccttatccatgtggttgatcttccatcaacaatctcttatatgttgataagataaagaccaaagttctacgaaggtaaccatttgagagtcttatctcaagttcagaatgaagaaaacgtagcgtattgcttttaaaccttataccatatataaattcatatcaaaggatttttatctacgtttgattaacgttgtccatatagttcgtaaccaaatgatgatagtaaaaacatcccattgcccaaacacataaattttaaccaatgcttaggccaacgagcctgcgttggaaagcttaattgacaccggtcaagttgaattggtcagcctttatagcagtttcagctctcttcaatagagaacgacgcaatagaccactgtttgaacctgtagagttacctggagctgcttgagatggcacagcagaaggtgcagcagaagcagcaggtgcactagcggctggagcagaagcagcatcggttggagcagcagaagcatcggctggagcagaagaggcgtctgctggagcagaagaaacaccagttgggacagtagcgttgttagctggtgcactagcggctggggcagaagcggctggagcagaagagtcatctgccggagcgggagaagcatcagttggtgcagtagcgttgttagcaggagcactagcggcaggagcactagcggcaggagcactagcggcaggaacactagcggcaggagcagcattagtaccattcaaagatggagatgcaacagctgcagcaggggaagaaggagcggtgttgttgctgaagccaccttgagatgccgatggggatgcaaccgcaatggttggatgagcaccagatgggtttggagcggaagaaccactagctggggcagaaccaataggagcggcagaagaggcagcagatggaggagcagcagaggaaccagttgatccacccgaactagaagatggagaggccgaggatgcaggttcagagctagaatcagaatcagacgaagagccaccaggaccagagttagtctcggattgggatgaagattggttaccatcttcatcagtaccctgagaaccagcttgagccacggaagaaccgccaccagaagatgaagatgattcggattgagagttagcaccctcagcagaggagtgagaactggaaccagaaccgctagaaccttgagagcccgaaccggctccagattgagcagctggtgaggattctgcaccagagccaccaccagagccaccaccagagccaccgccagggctaccaccagatccagaaccttgagagccagtaccagaaccaccagcaccaactgcattcagtggattagagccagctggaccagcggcaacgctgctgcttggtgcggtattattggcataaccaggagatgcattggtaccatttggtgaaaaagacgtaccatttggtgacaaggacgtaccatttgcaccaccgccagcagctggcacagaattgttagcggcacctgggaaagatggagctgcgacgctagcaccactagcagatggagcagcatttggcgccaaaatggtagtttctctggcctgggttagagccaaaagagcgagcacaagttgtggtttgaagtacattatgaattttagttcaacggtaggtcttctcggatttttactgctgtgaacttatcaatccgtatgataattttataattattcttctccacaggagaaacggaatagaaaccctgaattataatccaattggcatcatcttttatacactagatccatcttgaaccttgaattagatccacagctaagcctttcttcaccagttgcggctagaactaaagccagtttttgcctctagttacaataacgggtgtgtatcacttgtaactaaccaaattcaaagactcaatgaactcactcgaacgaaaaattggcggtgtaaattttgagattattttgtgacagttctagatgtatttgaagaaacatgattcttgaatcccgattgttagcttcccttcgaaatctttgaggaatcgagaccaatgattaaagggttatagtccgatcaagcaacctaaatctaccagttcgagccctaactgtgaatcaaaatcacgaaattaggctcgattgaatcgagttatttggaaaatagtaccagctgcaggataagcataaagccgtggaatacaacttaatacaatacagggcgtcatcaaaccgaactgtgggggaggggggccattgcccaagggtttcctactattctaggtctagctcatccatgttctagtccaaaaaaaggtcttatgacgttctattgttgattgcattccggccttctggaacattgactcaacaaagagtatttgatgctaagcccgcaggacgtcgcgaaagcaatcactcaaactcaaactctaataaatttctaaactcagcaatcctatttactaaccacgaaattactgagcattttggaattgattgggtaaatatagtgtttctgtcgaagaatgttacatttgattaacccgtttgtaaattcttgaagcgatattattgttcacatagtagaagggattcttgggaagacattcagggtcttgcattgtggcgctgagcaagatgggatgaaatagggtagggtgtagtaggatggatatgagagaactgagatcaagcagtagaaatgttgaagactttatgttcaagagcccactaaaacccgccaatagtgaatgagacgaatggaatctgagaaagatggactaaaatgaatggaaagagttaagtcgaattttatacgtttgacgaagtttcgactacgttacatgcgtaggtccatgttgaaactgttctgatgcaagtttgtataaccattcttactggatttgataaaaatactgaagcaaaactgaagcaaataaaagtcaaatatggatatctaataccgcccaaggattttttttaaattttaattgaatttctgtcgtattctagtttatatttttttccagcgtcacactgacacttggtgcgaaaatatcagaatgcccttgcgcgtaactctcagaacgcccgacgcacccacgcaggttttttgaaaaaatttttgacaaaaaaaaattctttaaagtgatgagcatcaaaaacgaacttttcactattacctaccactttcactgttacagaacctaacaaatcataatcaattaaatcactatgggtgcctacaagtacttggaggagttgcaaagaaagaagcaatctgatgctttgagattcttgcaaagaatcagagtctgggaatacagacaaaagaacgtcgttcacagagcctccagaccatctagaccagacaaggctagaagattgggttacaaggccaagcaaggttttgttatctaccgtatccgtgttagacgtggtaacagaaagagacctgttccaaagggtgctacttacggtaagccaaccaacatgggtgttaacgagttgaaataccaaagagctatgagagctactgctgaagaaagagttgctcgtcgtgcctccaacttgagagttttgaactcttactgggttaaccaagactccacctacaagtactttgaggtcatcctagtcgatccattccacaaggctatcagaagagatgctcactacaactggatctgcaaccctgttcacaagcacagagaagctagaggtttgactgccactggtaagagatccagaggtatcaacaagggtcacagatacaacaactctcaatccggtagaagaaagatctggaagagacacaacaccttgtctttgtggagatacagaaaataatcgtctccatcggtatagcattagtattcagtcttattattactatatatcgttgaaattaatagaaggcctcgtgttattccgggttatccgaagttttgaaatgtttgaaattgaagatcaattcaagattcattgtgctgttgactcctccaaaattgaagtgtgtcaaacaaattacgcaaatttttacttatagttagttataaaggttgtcattgtttaagtctttgtaagagcgagaacaacataagtcactcactcactatacagagatttgaagcaacacaagataagagaatgggtgattacgaaagtacagctattttgtctgtttatgacaagacaggtcttttagaccttgctaagggcttaagtgaagctaatgtgcgtatcttagcctctggtggtactgcacgtatggtgcgtgaagctggtttcccagttgacgatgtgtcgagtattacacatgcacctgaaatgttgggtggtagagtgaagactttacatccagcaattcatggtggtattttggctagaaacttggaacaagatgaagaggatttacaaaagcaacatattgataaagtcgactttgttgtttgtaacttgtatccctttaaagaaactgtagctaaagttggtgttactgtatcagaagccgttgaagaggttgatattggtggtgtcacattgttgagagctgcagctaaaaaccatgcaagagtaactattttatctgatcctcacgattatccagcctttttatctgaattgaaaaagggtaatggtcaagtgagccaagaattgagaaaccatttagcattaaaggcctttgaacacactgccgactatgataatgcaatttctgatttcttcagaaagcaatactctgaaggtaagtctcaattgcctctacgttatggtgcaaacccacaccaaaaacctgctcaagcttttgttacacaacaggaagaattacctttcaaagtcctatgcggatcacctggttacatcaacttgctagatgcattaaattcatggccattggtcaaagaattatcagcatctttgaatctaccagctgcagcttcattcaagcacgtctcacctgctggtgcagctgttggtctcccactatcagatgttgagaagcaagtttattttgtctccgatattgagaacttgtcaccactagcttgtgcctacgctagagctcgtggtgctgatagaatgtcctcatttggtgactacattgctctttcaaacatcgtcgatgtgcctactgcaaaaattatctctagagaagtttctgacggtatcattgcccccggttttgaggaagaagctctagctattttgaagaagaagaagggtgggaaatactgtgttttgcaaattgatcctaactttgttcctgaaccattggaaaccaaacaagtttatggtgttagtttgcaacaaaagagaaatgatgccattattaacaaatcttcattcagagaaatcgtttccgccaataagaacttgaccgaacaagcagttatcgatttgactgttgcaaccattgctcttaaatacacgcaatcaaattccgtgtgctacgctagaaatggtatggttgtcggtcttggtgctggtcaacaatcaagaattcactgtactagattggctggtgataaggttgataactggtggtttagacaacatccaagagtcttatccatcaaatgggcaaagggtgttaagagacctgagaaatcaaatgcaattgatttgttcgtcaccggtcaaattccaactgaagaaccagaaaaatccgactacgaatctaagtttgaacaaattccaactccatttactgaagaagaaagaaaggattggtcatctaaattgactaacgtttcattgtctagtgatgctttcttcccattccctgataacgtttacagagcagtcagaagtggtgttaagtttattgcagctccatcaggatctgttatggataaggctgtcttcagcgctgctgattcattccaagtcgtctacgtggaaaatccaattcgtctattccaccattaagaaggcttgtttttcccattgtaatgataatttttgttggtctacactgacggtataatgtactaaaactatcaaatgcaaccaactcatcaagagatctatctactattgttataattgttataattattattagtattgtcactactactatcacaagaatttcccatataagtagagaataaattacgaaaagatgtgtaaaaaatgtatgcagtatggttttacccaaatgataaatgacccataaggtcttcatagcgtccaggaatatactgctacagggcgactaaattgacgaccgaactcaatcccactcacagaagtaagcaagagaattcaaagtcaaagcgtcctgcttgatctaatttgacccgttgacggggctgcttctgcctcaaccacgtactttgtggcaacatctcagagccgtgactcctaccaggtgcgactcaaccccaacccgaaggtcagaggagaagctccaggcaagataactccaagatccttgaggctcgcctctcgagcgccaagatgttgagggaacttttgaggaagctaagcaacagtagcaagagacaatcaccggtccactgacgtggaagcggcggcatctcccttcctcggcactccccccaacacgagtctatgcttggttattttcaaaagaaaagattttaagacatagttcaggagtaattgagatgagatgagaagtaggcctttatatatgtcaaaattttttcaaaagtgttgacccgcccgaagaaaaaaaaagaaagacaagaatcagggttactacacccgactagggctcaagatgaaccaatcgatagttatatgatttagccgctgatggcgagtaaagaataacagtagtataccaaaggaattgccgctttctatccacacaggagcaggagttgagaagaagaagaggaagaagaaagaaaacaaacacaaacacaaacacaaaacatttattcacttattcaatataaaaagatgttcaaattgcatgcaacttgctatatccatgaacgtcccttctgcagcatacacatgagttgaatccacgtagccccaaggataccctacagctttcgcagagggcgaaacatctacaaggccacaataccacatttcttgaattagtcttacaaaccacacaggcaaaggtcgaatccatatcatcatcatcatcgtcgtcgtcgtcgtcagttctatgcgatgcagttctctcgagcaccacttcggtaagaatcttctgcggttctatagcggcgtattgttttctagttaacctagtaccgctatgaactgccgattttaagatggaccacatggatatgtaccaagaaagatcctcttgtaaattgtccatactttcaggagctaatatggtccctaaatcttcatcatcgctaccaaattctgtatcagtttccacttcctcactttggtccggcacgtaatcacctgaaagatcatcttctggtaacaaatattgattgttatcgagatcggtctccttctgagagaattgcggtttggacaagaattttgcgtaattcctttcagtcacatatctattgggatccttcgctaatggttcctgccttatttctggtgctctggatttacggaagaaagcaaagaaatgtttgactagcatgatgcaaattttgaatcttttcactagaccaggcgcattactcgtgcctggatgcattgtcataatactctctctatacctaatttcaatatcctctggaatcgtagagatgttattcaaataaccgctaatcacataactgtgatgaatgcttgagggtgcattgatatgagaaaactctcttaacacacctttgctcatcgattctctgcccatacatagcatagtagccagtttaaccacaacgcatgagaactcttcttcgcctgtacagtttaaatgttcccaccaattgcgcataaacgaataaaattgtaattcttgtggatctaaccctcccctgccaaacggatccaatcttaccaagtatgctaatgaataagtactgacagacatcacaatcaaaaacaacgagaacattttcgggaaatttatgtatcttgttgcaacaggcaatgaattaaaaccaaaccatcttactttgtaaatgaaatgccctatacctgcaaagttgagtatagtgctaccaaaaagacgatatttcctacattggaacaattccaccgagtgaactaataatctacccagtgttgccatcatacaatctggtaaatagtcctgcaaaggaagatcaagctgtttactcttctttagacaatagaaaagaatcgatagttcaaagatagagtaatcagattcctccaacggtagagtattagtagtcgatgctacaaatgtctccacacaattcgaccatgcatacgaggcaaatgtacttgaaagaaaagtggtaaactccaacggttctaacttctgaacgatcccatattgacacaatacttgcaacagtgtataaattagtggtataatagctgcaaggtgtagtaaaacccttgaccacagtggcaagacaacacggtttgcagttgatctcaaagatgccatgataacaatcctgttaaggatcaaagccgtaacaaaactagcagtggcgtagctactcaataagtaataggtgagctctttaaggcatctcacaccaaaccataggatatcaacatctaatgcctgttcatattgaagttttgcggcattcacaaaggaaagtgctaatctatacgggtagttaaccacagggctgaagataacactgtcgggaatcaaagaatgagcagtttgattcaaatacgaaaaagattctagaacattagaacctatagcactagtagcgttcatattctttccactgcctggtgtctcaattgtttattgcacctttgatctattgtcttcttgactccgtaaagcacgtcacaaaggtaaatctttatgaaaactctccaacaagagtttaaacccaacagatgtcgagtctgtcttgatgctcaaaagattaacgactaggaacaaggaaatgagctccaaatcctttcccagtttcaatatttctatttccttacaattagttttaaacttttaagtttgagcgtacgtccccatagagagatgacttgttgaaacgactaccacaacacgtcaccacgggtaaggagaatagtaagaagggaaggcagaattagacaccaagcgccttctctgctcatataataatcattagaaagattacggatacacgtagtcttcttgaatcaggattgtacttgcagcgttgggcctactatggatggtcatattcattgttgaaagttggaaaaaaagaagtggttgctgtgagattcgaactcacgcatcttgcgatacctgagggttcccagtagtttttactactggtaagagtcgaactcttgaatcaggcgccttagaccgctcggccaaacaaccatgtatttgttgtatgtaagtgggaaagaagatgcaacaagtcgtagaggttaatctgaccagtttgaacagttcaatctacttaaactcaccaattgaaacctgtagctaaacgattcttccaccatttctctgattactatcttacaactcagtgtcacactgacacctttatctgatatgcacgtcttaaatgatcactgtgtgcagtggtgtaaggagtgaacggtttttaacctcctcttaggtgacattttttttacctccccctcaacaacgaaattcaaagattctatcgtggtttgaagtataagaataagagaaacttaaacaagaacaattactgcaattgttgattaacctaagtgatcccgcgtatcatcaattgatcaaggttttatataaggaattcgtttgttccttggattgtctggttactcccctttttctcctcccatttttctcttcttctatctctcgattattgaccttatttaggatctcgagagtcgtcgtatcatcattattgtatatctcttctaattgacccataagaatcagaattaggatgttgaacgtcagaattccaagcattgctgccaaattggctccattgaagtcatcttccgctctgttacaatccactcgtatggcttcatctcaaacgatgaccgttagagaagctcttaatgctgcaatggctgaagaaatggatcgtgatgacgatgtgtttttgattggtgaagaggtggcacaatacaatggtgcttataaagtttcaaagggtctcttggatcgtttcggtgaacgtcgtgttgttgatactccaattacagaatacgggtttgccggtctttcggttggtgctgcattgaagggtttgaaaccaattgtggaatttatgtcctttaacttctccatgcaagccattgatcatgttattaactcagcagccaagactcattacatgtctggtggtactcaaaaatgtcaaattactttcagaggtccaaatggtgctggtgttggtcttggtgcacaacattctcaagattacgcggcctggtacggtgctatcccaggtttaaaggttcttactccatggtcatccgaggatgctaagggtctaatgaaggctgccatcagagatccaaaccctgttgtcgttttggaagatgaagttttgtacggtgaatcatttgaagttagtgacgaagttatgtcacctgattatgtgaccccatttaaagctaaggttgaaagagaaggtaccgatgtcactttggttgcttacactagaaacgttggttttgccgttcaagctgctgaaattttggacaagcaacacggtgttgctgctgaagttattaacttgcgttcaattagaccattggatatggataccgttatcaagtccgttaaaaagactaaccacttggttactgttgaatccggtttcccacatttcggtgttggtgctgaaattgcagctcaaatcatggagtctgaagcatttgactatttggatgctccagttcaaagagttaccgctgctgatgtcccaactccatacgctaagaagttagaagaattatctttcccagatgctgataccgttgttaccgctacaaaggaggtcttgtccattgaataaatgttgtaattcaatttttttttccctcttcatgatagaatagaaaattaccaatttatgagtttccgacattattgttattattactattactaaattattttgtctcaatttttcgctacagcctccaatgtttaacgattgtttgtactacaattagaagaaataaggaagaaaaaagataaaactaaaacaacaacgttaatttaaattttgatgttttcaacattatagcgcaaatattcatcatcaccttcaggaaatccagtttagattcaaattaaactacctgtctataatttttttttatctttatttttattaaattataatattttcgtcagtgtcaccgtagtgtccgaacatcttgttcgacatggcgaagtgaggtcaaagagtataccagctccagctccagtgaactctgaacaagataacctgtcaataaaggcaattgtaccctcacaatggcagggaaaaagaatttagctaagcatgatttgcctcaattttacctgttggtagccctctatttcctacaaggtatacctgtcgggttagcatttggtactataccttttttgttaaaatctatggcaaaggacacttcatttacaaccttggggattttttcgattgccacgtatccatattctttaaagattctctggtcacctattgttgattcgatatatgattctaaagttggcagaagaaggtcatggattatacccatccaactactcagcggatcaatgctgtttatcttaggttgggccgttagtaacaatttggtattcaaaggggtcgatgatgcttttcacggtagacataccaatggattacacgatttaaatattcttactctagcgtggtatttcggtcttttggtgtttttatgcgcaactcaggacatcgcagttgatggatgggccttaacaattttatctgcccaatccctatcctatgcatcaactgctcaaacggttggaatcaatttgggttttttcttatcgtttacaatttttatttcattgaactcaagcgatttcgccaacaaatattttagaagtcaaccgctagagcatggctttgttagtctgggtggttatatgaagtttgctggaattctttacattttggtgaccatctatgtgattatgtttacaagggaaaggcctttagatgacgttttaccaagattaggaccttcggcagccaaaaaatacgacgaatctaaatatgcagcggaatatcctgatggagatgccattggtactagtaataaggcaagtatcaaatatacttacaaatgctttggcagaattttgaaattaaaatcggtacaaacattagtatttatccatttaacttctaagttagcattccaatgcaacgaagcagctacaaatttaaaactgttggaacgtggatttaagaaagaggatttggcggtgaccgttttaattgatgttccattcgaagtgatctttggatattacgtcgccaaatggagttcagaatcgaatcatcatcaccattcacctcgtccaatagtatctcatagaaacagttgggttagatttttagtgggtgacccaggtattttaacaccttggctttgggggttcttgggtagattagcagcagcggctctgggtagttatgtgcttagcgttttccccaaagattctcaaattaccaaacctttcttccttttagtcattatccaacatctcctgggatcattcatgaatactgtgcaatttgtcggtatttctgcctttcatacacgggttgctgatcccgtagttggtggtacttacatgacactattgaacactttaagcaattttggcggtacttggccacgcttgataatcatgtcaatgattaactattttaccgtttacgaatgttacgtgcccgcgacaaatcatgctatcacctatcaaggaggtagtatggaaagatgtaccgaaggccttaatggtaaactctctatcctaagagatgggtattatgtgacaaatggtatgtgtgtgctctttggattaatcctttattttggattcttaaagaagaaggcccaacaattgcagactataccggttgattcctggcgttgttcttaatggcataccaatataaccctccggctactaaatatgcacatgcaagaccagacagttgttcagagaccgtgtgaaataccaaagtggtaactattaggctataccaccaaagtattacaagtgcaatcaaaagtagaacaggattctcccaaacaaggtatctgacacatataatgataaatttgatcaaaccttggatacattcccatgcaggcaggaaacccacaacccagattttttcaccaaccgtttctggacgtctttgcatcaaattacgcagcggactattatctaataatgtagtgaagtaactcaagggtcccagacctttactagataattttgaccaagctaatggtgcgaaaaaatctaactcacccaatagaaacattatcatcagagtattgaggaatatatggcccgatgggtcatgcccacctttccaatgaccaccagtcgcacgacatgcggcggaagtgcttatctctctaacagattttatactatcatgaatgaaaatgttaatttcactaggtgaaactagcggttctgttgaatctgatttctcgttggaaatacccatcaatcgcctaagtgtcgccaaagtatgtgacgccaggttgccttttaattcatcttgtgtagtcaattgaaaccttaccaaaaatgaatatatcttggataaagatcgagattttctagaatcagaatcctggaaactcgagttcaaattgccatcagcatctaagacgtcaaatcgacataaaccaccagtagctaaaaatatcagatccattataggcgcagtatggaaccataaagcttgtgtaaagacgtaccaccaggcagtaagaatcaaataacgtgtgaaagattgacggttaaattttccatatcgatatacgcacatccacataactaacgaagtccaaaaccaacccttcttgacgaagacagtattgatccaaccatctttgtcgactgaagatggataagaacttaagtaccctagaatatgtcccagtagcaacgtcaagggacatagaaacaatgtaattatcccaaacgtcctcacagagcgcttcatctggctagtcaatgcgctttctttggtgtactaataccttgtgttaattatcaagaagactcggacttgttgaaatagtgttgaaattctaccatacgacaagaatcgtttgaagagtgcaaaaaagatgtctgtggaagctgatcaagagccaccggtcgccgaagaggttccttcgctacctactagattcgaagttgagttagaatttgtgcagtctttggctaatataccatatgtcacctaccttttaacgcaacagcaacagttgtggaaggatcccaaatttaaaaattatttaaaatacctagagtattggtgtgaaccaccatacgcactttgtattgtctatccaaactgtctttttgtgttgaaattgatcaatggctttatggagaactctacggttaacgaagatgggctgctggatggcctcgaagacttgcccaaggtactacaaatgcaaggtccacaatggatgaacgaaatggtcgacagatgggtttcataaggtgtcaaagagaaagactggaatcaaatataaaatctttcactttgaaaattctcgaaaaaaaaagcgagataatagtgtcgaaaatgcctttcatacttctagcgttactatatgctattgaatactgatgaacactgtcttgctttgccaataatgcgctagtgatgtaaaatagagatattgtagtgctagataattttttaaactactactactactactactactactactactactactactactaccaaaaaaaaaggtaaatgccttggaaagtttcaagagccctcgctaggtacccagggtcgtcttaagataaacttgaatacctttatatactctatacttttacgatgatcattattcttcggcgccagtgtgacacttctagctctatatcaccctcgacgaaggattttttttcaatggtatcagggaagaagaagaagatgagatgatgaatcaactagaagtaatggtttctaatatcgatagcttaccccaatccatccactgattgtcctctaatatggccggcaagaagattaaggctcatccaaaggaagagatggtccaagatgatcgtttacaagcgattgttttgacggattccttcgaaacaagatttatgcccttgagtaacgataaaccaagatgtctacttccattggctaatgtacctctacttgaatacactctagaatttctagccaaggcgcctgttaaggaggtatacctggtttgttcagcacacgcaacactgattagtgattatatcgaagcttccaaatggagtttcccctggtcaccatttaaagtgttcactataatgtcaccggaggcaagatcagtaggtgacgctatgagagatttagacaacaagggtgtgatagcaggagattttgtgttgatgagtggtgatgcagtgaccaatttagattttgataaattctgggatttccataagaggatgcatgcaaaggataaagatcatattgtaactacatgtttgagtaaagcaacccaatttcacaggactagagcatttgaaccagcttctttcatcctagataaatctgataacagatgtctttactaccaagaaatcccattgcccagttctagagtgaaaacctctgtagaaattgatccagatctactagaaggtgtagacgaatttgttttgagaaatgacttgatcgattgtagaatcgatatttgctcaccattagtacccgctattttccaagagaatttcgactatcaaatgttaaggtcagattttattaagggtgttttatccagtgatttactgcgtaaacacgtatatgcctacattacagaagagtacgcagctcgtgtggagagttggcaatcttacgatagtatttcacaagatttcattggccgttggtgttacccactagttttagactccaatttaatgccagatcaaacttattcctacgaatcaaatcatatctacaaggagcaaggtgttgtattggcacaatcatgtaagattggtaaatgcactgctattggttctcgtactaaaattggtgaaagtgcattagtggagaactgtgtcattggcagaaactgttatatcggttcaggtgcagtaattagagacagtcacatttgggacaatacggtgataggtaacaacagtgtcatcaaccatagtattgttgcaagtggcactaaattgggtactaatgttgtacttaacgatggatgtatcataggatttaacgtcgtgatagaagatggtaaggaattacctcgtggtgtgagagttaatggtacgccagtcaaagactcggaagataatgcatttggtctttccgatgaggaagatgaagaagaaacccctgagaaggataatcctgaaatcgcatttgaattatgtggtaccaagggtcgtggttacatttatgaagatccactttccgaagatgaacatgatttaccgattggtgaggaaatggtcagtggattgtctcaccgtttagacgaagtttatttgagtgacagttccatttcttctgtcactaaaagtaaaaagaagcgtacaatgtctacgaacagtgcttacaccgatagagaagaagatccaacagagtttgaagatgaagaagattttggtgttgaaggtgttgctaccgtaaagagagctatcgaaaacaaccacgatttagatactgctctattggaattaaacacattgagaatgagtttaaacgtttcatatcatgaagtgagaaccgttacagttgttgcacttttggatagagtttatcattttatcgctacccaaacgttaggtccaaaggatgcagctaataaggttttcacacgctggggtcccatgttccgcagagaagcttttgatcctgatgaatacgtagatttaatgaacattgtcatggaacaagttgttgaacaagaattggagaaaggtgatttaattctgttcagcgctttcaacgctctttacgatagcgatatactagaagaggaaatcatttacgactggtggtctcacgtctcgaaagatccaaaattcgacgatataaagaaattggtagctaaatggatcgaatggttgaaagaagcggatgaagaatcttccggtgaggaagaggaggaagaggagagtgaagaagaagaagaaaattaagtaggtgctgaaggtgacaagtagaaagaaactttaaaaatgttgtaaatatacaaaatacgcaatattataatatcttaatattatattttttatggttcccgctaatcggaaaagggttacccgccctcggttcttgaactgaggcaccaaaagttaaaatgaatggacgtttcgttgatcgtgggaatgaaatctaataactaacataaagagatcccaagaggtcttaaaggagtgagagttagcggtttgaggaggaactaagtttatccaaataaaagggagaaacctagagtgattgtgagaagaatgcaaactctaaagtgtgttgttgtaggagatggtgctgtgggtaaaacgtgtcttttgatatcttacacaacgaatcagttcccagcagattatgtaccaacggtttttgataactatgctgttactgttatgatcggtgatgagccatatacattaggtctatttgatactgcaggtcaagaagattacgataggctgagaccactttcttatccatcaaccgacgtatttttagtatgtttcagcgttatatcccctccatcattcgaaaacgttaaggagaaatggttcccagaagtgcatcaccattgtccaggagttccatgtttaatcgttggtacgcaggtagatcttagggacgataaagtaattattgaaaaattacagaggcaaagattgcgtccaatttcacaggcagaaggtgaaagactttcaagagaattgagagctgttaagtatgttgaatgttctgccttgactcaacgtggattgaaaaacgtttttgatgaggccattgtggccgcattggaaccaccggtaattaagaaatccaaaaaatgtactattttgtaggaaacataattgggtagatggatttttgtttatttgttacagaattgaattaaattgaattaaattgaattaaactgagttgaatcgaattatacaaagcataagcttatcattattaaacaaatgaagtaaaagtaagataaaatagtaatgatcataacagtaatgataaaaaaaaaaaattgaaaggaaaaaaagaaaaagctgaaggtaaaaatgtgaatgaatgcaaagggattcgagaagaatcttggctgttgaaatttattttgtctttttattttttattttttatttttttttttttttttttttttttaaaaaaaacatatctttttacttaacagacaattccacggtcccataccttacagcagccatcccaagatatatgttcatactttaaaaaaaaagaaaatttgatagttaaatcttcaacaaaaattcttcaacaaaaatcttgaaagctacaatgatacatcagcttcaagtgagcggtgctcattgtcgtcttatttttattttaagccgtatatggagtgataacattagtatatccatttatgacaatagtaataagtctgacgcgaatattagacgcgagttcaattctcaatggacgctttaggagaaaaagaatgatatctgttcgaaactcgcaaggctcctttacaataattaaaagagtctttcgttcgattcccgaaatcgcattttcgcttttttttttaatttatttttttttcttcgaaaaactttttttcccactgagtggcaataagagaactacttaacgttctatagtagtataatattcatcaagggagatcagaataggaagctacagaattctccaattgtcttaagtttcaatgtctcaggtgtataataattctcattcagacacccttttccttggtggtgaaaagattagtggtgatgacattagaaatcaaaatgtcttagctgctgctgcagtggctaatgttgttaaatcttcattgggtccagttggattagacaaaatgcttgtcgacgatattggtgatttcacagttacaaatgatggtgcaacgattctatcactactagacgtacagcatccagcgggtaaaattctagttgaattggcccaacaacaggatcgtgaaattggtgatggtaccacaagtgttgttattgtagctgcagaattattaagaagagccaatgaactagtaaagaataaaattcatcctaccacaatcatcacaggatttagactcgcattgagagaagctattaggtttattaatgaggttctttccattagcgttgacactttgggtaagagtactttggttaatattgccaagactagtatgtcatccaagattatcggttcagaatcagagtttttcagtaatttagtggtggatgctctattagccgtgaaaactcaaaattcgaaaaatgaagtcaaatatccagttaaggcagttaatattctaaaggcacatggtaagagtgctaaagagtctgttttagtacatggatatgcactaaactgtacagtcgcatctcaagcatgtcccaaacgtatcggaggtggtaacgttaaaattgcatgtcttgatataaatctacaaaaggctcgtatggcaatgggtgtacaaatcaatattgatgatcctgaacaattagaacaaattcgtaagcgtgaggcaggaatcattttagaaagagtcaagaaaattattgattctggcgcacaagttgtgttaactacaaagggtattgatgatttgtgtttgaaggagtttgtcgaagctaagataatggcagtaaggcgctgtaagaaggaagatttaagaagaattgctcgtgcaaccggtgctactttgatcagttcaatgtcgaacttggaaggtgatgaaactttcgaaagtagcagtttaggtacttgtcaggaagtggtgcaatctaaattttccgatgatgaatgtattttgattaaaggtacctctaagcactcttcatcgtcgattgtgctccgtggtcctaacgattactcgcttgatgaaatggaacgttctattcacgattcactctcagttgtcaagagaaccttagaaagtggtaatgtggtcccaggtggtggttgtgtggaaaccgccttgaacatctatttggataattttgcaacaacagtgggatctcgtgaacaattagcaattgctgaatttgcacaagctctaacagttatcccaaagactctagccgtcaatgctgcaaaggactcaagcgaactgatcgctaaactaagagcttatcacgctgcaagtcaaatggctaaactagatgaccataaaagacgtaattacaaaaattacggtttagatttaatcaagggtaagatagtcgacgaagtatcatctggtgttctagaaccaactataagcaaagttaaatctttgaaatctgcattggaagcatgcgtcgctatcctaagaatcgacaccatgattgcagtagacccagagccacctaaggaggatcctcacggacactgaactccggttccgtgctcactgatatgagatatacctccttccctgtataataataataataagaataagagcctcttttttttttttttttttgccatggcaactaactaccaagactttttaccagcaggagggtgcggtgagtaattccggcttcctttctaagacgcctgcctacaactccggttgagtgataatatcgtagtatgtatatcaagaacagagattatgatcaagtcaaataaacttcattctcatcccatttttctcttcatggataatactatccggtcataaatgcgaaaataattttgctctgtgtattctactcttgtctcgtctaatccacgtcattccagtcaatcatcttgtttttcgtttcccactgatttactgacaccattttttattttttttttattattatcaccaactgatgtcgtttatgaagtcggaagctcgtttaagatttcatgagcctaccgaactcatcaggtggtagctaaacgagaaggggagtttgagtcttaaaagatcaacaagctcatggcattccattaatggattaatatacaagaagctattagatatttattcattcgatataggacaagctggtatctctcgacaggcgaagtttagtttttgtatttctttggacaggtgccggaatggccttagaggctataatattaggtttattcattcgctagagttatcgagagttttctaaaatcaatgataaaggataaaatggataggaaaagtgtattaaaaaaacgagagaaagtagttgaattaatagaaatcgacggcaagaaagttagtataacgtcaactggtaaaagaaaatttcataataaatcaaagaatggctgtgataactgcaagaggaggagggttaaatgtgatgaagggaagcccctatgtcgcaaatgtgttaacatgaagctggattgtgtctacacacccgcacaaccaaaaaagagaagagaatctacggtagtgaaatatgttacgagaagagctgccagtggtcaagaagaaagggtgcccgcaagcgaacttgccgatcattcgagtgacgattctagttgtgatagtagtcgttctgcttctagggctccaaaccctacacctgaagaaatcacacagacagatttgcaggagagaaggatatttgaaggaatgccagcaaaggcacctccgacttctactccacagcagcttccacaacctcagcaattaccacaggttccgcagcagttactgcagcggcagcagacacataagaatatagggtctccagacaagacgttctccacgacaaacggttctcggggtatgcttgatggactactattaccaccattaggatctgaaagttcacatttgaatcagcagcagcagcagcagcagctacaacaacagctacttttattgccgcagttgatgacactgtcgaattctgaaaaatatgctgcttttgaaatgccaaatagtccacctttgcaacctgctggaatgaatattaccaatagtattggtagtatattttctccaaatcgtttccagcaacagcaacagcaacaacaacaacagcagcagcagcagcagcagcagcagcagcagcagcagcctcctgctcaaccgccaactctgccttcatttcaagctgaatcaattgctcaactcaacaaggcaagcatcaatttaaaggcaatgggtatgtttcccacggcgggtattggaggtgtaacttacgattttcaagaattactgggtatcaaatatcctggtaattctcaagcttcaaaggcatctaatgctgaggaagccctggcgaatatgcaagagcaacaagaacaggcaactaagggcgacggtgatggaaatggaaatgaggagacaactgcaaataatgacaatgaacatagtgctgtgcacatgcttgcaactccaagtttaccgaataatccaacaatttcaccagctgcaccaataactcccatgacgaaaacgtcgattaatgctgcggccgccacatcatctccatcggttactgctgtaccaggtacaactgctactctagcaggagctggtaggacggatcaacatcctgcacaggaacaggtttcttcgcgtaatgattctagtgatggatacgtagctaaccttttacagttatctcgcgaaggaaatttaaacttgatagatttgaaattgttccatcattattgcacaaaagtctggccatcgattacggctgcagggatttcaggtcgtgaagtgtggagtacagagattcctgaacttgcatttgaacacccatttttaatgcattcactgctggcatttagtgcgacacatttatcacgtacagaatcaggtttggaaccttacgtttcatgccacaggttggacgctcttagattgttaaggcaagccgttctacaaatttctgaagataatacagatgccctagtggcaagtgcgctaatcttaataatggattcactggcaaatgcatcgaaccaaggtacaacaaatccaagttcgatgtcaccatcagcgtggattttccatgttaaaggtgctgctacaattttaacggcggtttggccactaactgaaagatcaagattttacaacttaatttctgtggatcttagcgatttaggtgacgttataaaccaggaatcggccacgatttctgaattggtttgctttgacgaaagtattgctgatctttatccggtggaaattgattcaccatatctcatcacattggcctacttggataaattacaaagggaaaaaaatcaatcggatttcatactaagggtctttgcatttccagcactgctggacaagacctttttagcgctacttatgacaggtgacgctggtgcgatgagaattatgagaagttactacaaattactgagaggatttactacagagatgaaggacaagatttggttcttggaaggtgtatctcaagtgttgccacaagatgtcgatgagtacagtggtggtggtggtatgcacatgatgttagacttccttggtggtggattaccatcaatgactactacaaatctttcggaatttatgtgaactgggatcggtaacccggctatttggaactttccagaatggaaacggctgaacatggaagagagctcgttatagaatatatataagaatatttaaaggtaataaataatatttgatgttctgatcatgctgaggtagaaaagtgtagcaacaggggtgttattagtgttaaaaaatggtcgttcataatcctaacaattggcattgggttgataaaaactgtattggatgggctcgtgaatattttggcgaaaaattgacaaaattgaatacaggtgatgttaatggtaaatttgcagaaattgcttctgtgagttcagtagaaggtgattgtgaagttaaccaacgtaagggtaaagctatttcgcttttcgatttgaaagttgtccttttaatcaagggacacgttgaagatttaccatttgatggtagtattaacgtccctgaagtggcatttgacagtgaagaatccgactatcaattcgaaatttccatctacaaggaaaccaccaaattaaacgaagtcaaaccagttatcagagagaaattgttaccacaattaagaacagttttccaaaattttggtaaggatctgttggcagttcatgcaagtgatattcaagttcctgaatctcaagttaaatctaaattcacaagagcaaatgcatcaacaacatcatcgtcgtcagcaacgccagcatcaactccaaaaccagcaccaacaaccgctacgaaatcttcagccccaactacaagtggtgctaaccgttcatcattgcatttagagcctacttttaacgtgcctgcaattgaactgtaccgtacatttttatacaagccacttatcatggcttggtcaaggggttcattacaaagtgcaacaccaggtgatcaattgaaaactggtgatcaattcgatttatttggtggtaacgtcacaagtaaattattggaatgtaaggaacccaccagattggtatttgaatggagattgaaggaatggagtgaaaaggttgtttctaaattagtgatggaatttcatgagtctcaagagtaccatgagactaaattgcaagttagttggtcaggtatacctgtcggtgaagaggatcgtgtcagaggtaattttgaagagtactatgtaagatctatcaaactgacctttgggttcggtgcagtcctataaattatgctaattatgctaatttttttactttttttttttcccagtcactcattatagtatattatagaatcgtcattaaacatattttgttattatctactttccattaatacgtatcctaacttgaagtttcggcccttatcgattttaagtcattcgtagtcaatggtgcttctccttcatcgtcctcttctttaactggttttttatttccttcttgatgaatcactgtttcttcagcacacgattcattccattctttcaattcctttgcatgttccctttcaattgcaaagttaacggcctccaaaacattttcgcatgttttctttggggtataccttggtgtaacgccatccttgtaaacacctgtcttgacgaggatggagtaccaagttgagtcatgagaattagcaaatctaatatcagattccggtgtatcaccgacaaaatatactgttgaagctggtggtaattccaaaactaaatcaccgggtctttcaccactatcattaccccaatctgcttcatcttcttccgaatcggaatcaccaaaaggcgtttccttattttcaccttcatctggatcttctaattttaagttttcaacatgttcagagagtgtttctcttctccaatttgatagcactttttcagcaaatctaaatgtacctctctgtggtttaccaaatctagtaacctgtagttctttaccagtatgctcttcatataaagctgcaatcgaaacctgcaatgcacccataccatatctacaaagaccataatcggttgcccaaacaaaatcactatgagcaaaataaagccctgggccttgatcataagttgggctaattgttcccataacacctttttcactcatcaatagttccaagataatttgttgatcggcggcccagtttcttgaatctgcaaacactaatattgcttgaatattaatttttgagaaatctacatccttagcgatgttcctctcctcttcatttagcacgtagtaaggggtaacgctaggcttccacttcataacatctaatggaatgtaaacgttcttaaatccgtatccttcagcaaccttcctgcaagaatccaagacaccccctacaactagaacattttcatagacatcaaccaaatctttcattggggtatgaccttggatcacttgatcctctgtaacggtaatacctaaacgtttgctcaaatctctacaacgtgccttttctgacctaccaccaccattggtaatgaagatgtagggaactttgatgttgtatttattatggccattcaacatacgtaaagcttcaggcccctgaggaatagtttcaggacctttgaccaaaacaccatcaatgtcaaatgcaaaagcataagatgcgaccctttcgtgattgaccacagacttcctatgacgaactggtatagaacttttacgactacgtgagcctttatgtccaccgcttgtcacactaccatgacgagaaactttcgaagatgaaccttcgggatgcaatggagtcactgctgaccattgatcactcaaagacaaagaagagacacgtttcttacgtggcattggttgaaattcttggggattattattctcaagaaaagatttccttcttggttgtggttgttgttgttcaccaactttcgattttggttcttcatcctctactgggaaagaaactggactgcccatacctgaaggtcctgtctccttagccgcagagacaccagccttctttgaagaagactggctcattttatttaatttttgactcaatttgtctgccattatcctgtagagcttaaatgtataaatcagctgacctcactgtccttgtctattcctgtgtactaaaagtttattatactttgtataagcacatccaggaagggagacacataatcttcataatacagtttttcttttcccttatatacccacgatgcatttacaaatccccccctaaaaatataaataccgagacgcagcggtatgatagattgttatggaaccgctgtaacgtagaagagagaagatgtccgatgacgccattctttgcttaatcttggtcttactagaatcgaatcatgtggaaccagctggaacttttgtttgcttttaagcttattgttctccaaggggcagcaggagagaagaatagaaaaaaaaaaaaaaaaaaaaaggggagggttactcttttagtatcgggaattgcggtggtgtgcgtatgttttgtgtacagttcgttactcttcttccaaattacaaggggccctttgcgtttctctccctcccacttctcggcggcaaagttttacaggtggaggcgaagggcagttggaagaatctctattgtgatgggaaagccccgcgggtttcagcctcctcggagtacagaagcgaggggctcgaacgcgtcgcctatagtaacgaacgagacatcgggcctacgaccagtcatatgattagcagggagagaaccagtaattatggttttcgcaaggtaaagaaagtatccctgctatgtaagggctacaaaattccggtttatcactccttgactaggcaaagctaggcccatggacaagttggaatgttcgatttaaagaattttctcccagcctatatcactcatgtatcaggggagtttctctattgttaagggaagtatgtcgattcatgcacggtagatacgcggctattctgcgccattttctaccgcctgttactagatcgacgtcttctttttgtttgttttaaccccgcctcccccttcgttcgaaactaccttcccatctgtccctctctttctctccccgtatgattcacatgcactcgaagataaccccgcgaatatatgtcatgttggaacatggctgtaccgacatacgtaatatatttacataatggcatgatgttctgatgcggtaaaagttgcctgcacggttccccttatccggattgattctgtcaatggagtgcctactatttacttgtcaggggtagctatataaaggaggtggggaagaaaagaacgaaccgaaaaatttcgttcctctcttccttacacctacatgtcaagaaatagccgctgacacgagaatacgagaagtttcagtgcacatatacgtatacatatatatatatatatattgattgctactgttaatagagacttgtgaaggttcttcatctttgatcaaatcttccttgcctccaaagtgtgtttttctttttgtatttttttgtcccgatattttacatcaactctggttagttgatgcgctgctgcatataacacatttggttttacttttccaactagttgatttggctggctggtacgatcttaaaaagagagggttgttaatattcttcctttttacctacaagtttatttttgatttagtccgaataacaaataatcgggaatccgcgtttcggattttaataaagtggggttgaggggacaggtcagaagcccactagaaaagaaagatattacgaatagcattattgttattattaagtttaatacgtatttttgattggtattcaaacgtcaagtatggagatgaacgagctgatagatcgcagtagtgatgagaaagaaattactacaactattgctagttcagcaacaagtgttacaggggaagatttaacgctaagtgaccaaaagcctattagcaataataataataataataataataataatacggaaaatcatagtatgaattcgagagtgaataaacagttcaacaggttaccggaaaatttaaggcttaacggtagaacaccaagtggtaaaccaagactatttgtctgtcaagtttgcacaagggcatttgctagacaagagcatttgacgaggcatgaaaggtcacatacaaaggaaaagccttattgttgtggtatctgtaatagaaaatttagtagaagggatctacttttaaggcatgctcataagatccatggcggtaactatggtgatactattattaaacagaataatgttaaggaaaatagtaataatcgggttagtaaaggtaggcgaagtggatctgttacagctgcaaatgctgcaaatgctgtaaatactgcaaatgttgctgcaacaatgacaccaaatctttcacatccatcgtctctgccaccgattagaggacgtagagcttcttatagtgcacaatctgggaattatgtggcgcctgctcagaatgaacaatggcataaagctgatagggtcaagttttcaacacccgagttattgccaattaatatgatggatgatgatttatcaaataatgcgacaaaatcaaataattttgacggtattggtgatgatggtaattgtaatggtaatggttttatggaaagtatcgcacctttagaactaaacgcgccctgggaatttaacatgttagactctaatgattggatttatgaatacaataatcaaaatgtgacaacttccggatccgcaacggcggcgggtgggcccacccctggtgattctccaaatagttcaagtgtagatcctagcaattctagtattcgccttggaaattttccgcaaagttctggtgaactacgccgtgagactattgataacagttattttgaaaataacaaatcgagaaaattatcttgggccattaatgaagaggatggtagattgcaagtgaaatctctattcatgaatcgaaataatagtgcacctctaccaagaccaatccgtaatgtgacaaagaatattggttcaccaagtaggtcatcgataagcggtagtggagctttaggggtacgtgattctttaaccggatcaactgcttctgcaacaacacaaacaacgactgcaacgaccgcagcaacaacaacaacaacaacaactgcagaaacagaagatgattggctccctatggctaatcatactgatagcgtttcatcatcagtggcgcctttgcatacgattgatgggaactcaaacacgggcgccttgctggaacagttcaatcgtttagaattcaatgataatggtatgggagatttgtcagagttcacaaaggatgtacaaacgatattcggtcattatattcaggatgaacaatctgatgtttacaatattcctcatcaatttcctttatcatctagtaatgatgaaaatttaacggatcctacgatgggatcaacaaatcaaacttcaacgagtgctaatgataattatactttttatggtttggactacttgacactttccaatatttcgagagcatcacctccaaataatctcaattctgaagatttaccatcgtctaaattgttcacacatgaattacgtcaaatttgtctacattctttgagatattatagtaatcattgcaatggtgttttaggttcagatccagttttcatctctaaggatctcattctacctagttgcagtgaattaaatggatattcgtcgtattttcagaaatattttaacccgcatacggcttttattcatcctgattttttccaattagatttaccatctttgatgaattatatcaatgaaggtgatacgaatgatgaagaagattcacagtatctacaatattcaaacattgcgtgtttacccctctttgtggctaccgttggatccatttataaatcaggttgtaactcgagaactatggaactttacgagattagccgccgtgttcttcatgtgtacttggagagacgtaaacaacaacagagacaacaatctgctggtgaaaccccgatggagggagtacgttatgaaaatcgtcaacgaatttggttgatacaatctttgattttaagcatcacctttgcactatttgcagattatttggaaagaatggactctggaatgattaaacgtcaagtgagtgctatttgctccatcatcaagggtaatttcttgaaaattatctctatcgattgtcatgaatttttttccagctacaaagatttaaccttcgataatccctgtgattatgttttctttgaatccaaaatcagatgtacattaatggtttacaaaatttgccaatttctcaaaattttctatcgagttggatctaagcttttcctcaatgaaaaggacttggatcctgtttgtattcctgatgatgaatctacttggctgaatagttcgttattggtccccagcaagtccacgaagaaaaaatatactgtagacttccaaaaattttatcacagtttcactttcaacaatactggtatgcattcaattcccgaatgcttgaccacggctatgttgtactatgaattcaatgaaattaatttttccccattccatgtatttttaacaagaatcgataccaaaaaattggaactcaatcagacacagctttcacagatagattcagatccaaatatcgttacagctcatgatattttaaattctgatagtatcactttgaggaattgtctaatgtcaatggtttttctcactaagattgacgttacattcggttctaaaatctggaacggtaaattaagggaactgtttacttcatttttggatccatcatccattaacattttaacaaaaggttcttatagtctcttaacagatttcctagtggcattgaatttttccattaaaaatgtgtcccatttccttactcttaacgaaaatggtactgctatcgaattggataagacaaacatgtctctgttcaactgtcaaggtttttactgtaattttctcattttgattaaattcatcctcgatttcgaatgcactccaaattttaagttactgtgcatcttcacagagctaaagaaattagcaaataatctattgatccccaagtattctaacctgtatccaatggaatttgctaaatttcaagatgtttcattgaccaatacttatttgcagcaccatccaaaatcggatgcatcagccaagttttccacaatcaatgctcataaattggaaaagttgattaataacgttttggtacatgcatttaatgatgcatctttccttaacatgtctgagcaacctaccaacgaattcctattcaataataaccatccgacttattacccctatgcatcaccaacaactacagcctttaactatgaagaaattcaattcaaaagtccttcttctccaacttctaatgataatgatttcttaccttctaaatcatcagttgatctacttcgttatcaaaataacaacagcgacaacaacgcgaacgataatgtcggcgggagtgttaactcaaacaacgatgaaggtaatctttccaaacaaggatttgcagaaaggtatcaactctcggataaatatattgtcattgccaaatgttttttcacccacattagagaaatatatgcccattgtcacatctttaaaaaaatgattgcagatttccaacaattagaggattgtattgatgagaaaagacgaaaatcaaatatgtttaaaatgagtcgagaagatggttccaacgctactatggcgaaaaatgcttcatctaatagcaccgttaccatgacaaaaaatcacagctcaggagatttaattaacaaatttttgcaaacacaagtttgattatttataagttcgcattttttttcatacatgtatatgatattggcttttgctgatttgtttcttgtgctcgtttattattatcattacaattatagtaacgaatattatttttactattactcttagttgttgatatcaaaacacgccctattttttttccgcaaattattgtgaggaagagggtggattgcaaagagtagaaaaaattaaagaataaattcaaggtccctattttgttattagtatttttatcgtatttactacccgtcgcccttgtactgtacatagtgtaaaaataacaacttttttatgttaatgacttcatgctgcagtgattccaataatcccgcccctcataaaatcgtctccccgttttataaaaaattaatcgaacccagaatttccattgattaaagtttggattaaccattctttcgattccacatgaaaattcggagatgtttgtccaccattaacaaattctccccaaattcttcccttgatttcttctaaaatttcatttggaagcccattgtccccattgatgtaaataattattttggaattgtcttgtcctagcaaaatagtattagtaaaattcgttaaaacatttaaattctggattgtcgcaaaatttccaattttactagaaatttggaatgtcgttttgacacccaaacaagctagtatgaatcttatgaattgatccagtcctgaatgaccaaaaattatgacgacgtagtcggataaaacgtgataattatgtccaatttgatccttgagtaatgcattttgcaaaagcaggaggtaaaattggaaaatatcgttggatttaattataccagattgatcttcacttcgtgagtttaatctaaaactttcacctgaaggtaaaagatattggtgtatgttcttcgtgcataatttaccatcggagacgcaccgttccacaaatttccaatgtaaagtgggccatcctaacgccaaagtttccagatattttaagcttcgaagatgttttgtagaaagaagacacccaaacctaaggttttctgattttatattggatttccagcccaaattcaacgtatatttctcaatatgttggtctctctcctctaaaaattcaaaatcaaataagtcggggaaccctgcatcaacgattctcccacctaatgaacctatcacttctgaaagctcatatttctcctcattaagaccagacaatatgaacaaacagtctttaaagatccctggatcctgggaattgaatagtttccttttcaagccaggcgattccaatttagaagataattcaattataccatttttaccaacagaatccacgctatcattggattcatcatcagaatcctctttgtatgtcagtctacccgttgctcctgaatcaagtctggccttcctaggggataaactggtgatgcttttcctgccacgaattggatgttgcaggaacttgaaggctttggctctggtatgtgaaccttcctccaatattacttttggtcttttggcccattcgtttaaatctaaactaatcgatgaaagcggtaccacagaggtttttttccctagttttccagaaacattccgtttcttgagatgaatggtatcgtaaccgcgaatgcaccttatcacaatggggtcttgagttctacgttccaatgctatcactttatgaactctgccatgccaattaaccgtatcaccaaccctgatgtccaggtaatatatatcatcgttctttgtcaatgattgcccagtttcgaagacgacccagcaaccatctgccttctcatcgtatgaaatcaggcggccagggtaaaaacagtagttgagattgtactgacaccaaactgcatcctcgaatttgatatctttcttagataaaaaatcttcctcccttttcctaacatcttgagggaagtctctaattttttccaaccaactttcagatggaacttcatttccagaacgaagttctgttaaggctgatttttcaccatcaatctgaggactagtatctggtgtttgcacctgaacttgatgaccgtggtctgtatctccacgtcgtaacttttttttcggatgatttctgcacctctcgtctaattctccttcttctccctcttcttcttcttcttcttcttcctcttcttgcacaatggttggtctagttcttccacttcttttccaagtttttttagtgatctcttgtgattcttcaaatgaaccatctgcgattcttctgaatgactcctgttctttcctcttttcctgtgaaccctgttcttctagttcaggtaagtcttgggtaaggtcattttcactaattacaatagctgtgtttttatctgcattctcttccgcccctggctcgatatcaaagttgggaaataattctggcttacctgagatctgcagtaagacctttccctgattatctctttcttgctccgaatcatttctggacactgaaggtacactgtatcttggagaactggaccttgattcgacatcaataatatcccttgacttggaggcggggcttgttcccagaacttcggtgatagcaccaacaccactgaatctgcctggttcagaagggatttcttgcgtgtttccatccatattacgttcaggagatcgaacaatttgcgtcggtgactccatttcgttcttcttgtgatccactggagtctcttgagcgttgaaagaagcgacgacttgagtttgtgtttcattagcctgtgagagactcgtttgggtattttgaaattcgctattcatctcatctttttgcgtttctccggtgggtattatctgagtagatttgttactattttcttgatcatttttattggacctgaagacccattgtacagatatatcaccgtcagtggtatcatttacacgagtttcttcatggcacatattctcatcgttggttttattccccatgaaaacatcaggatctttttcatttgaggaaattttggtatgttcatggtaatcgttatctggtctctgtattgtatcgttatcatgatgaaaactttcgacttcctgaattccttgagtctgtagtttttcctgagattgagttccttggccaaaaaatttcaatctattcgtatgttcataatctgtttgtgactctagagtttttccctctctgctcgcattcaaattatactgaatatctgcttctgtcacctctagagaaggttcatcatcaacactatgtagatttctcacatattcggtactagatgattttttattactcttgagtcgaagaggagaatgatcccgccgttgagaaaccggagtatcttgtgtcactgaagattcaaactgagctagaagtcttttctgcttgggagtcctattgtttcgaaagaaatctgcaatcttgtctagatcaggtgtccttttattaagccttagaggtgattgcggcaaatgttcgatctcatctcccttggattctttactaaatacatccatatcacgatttttatcaaccagaggtgaagaataataatcgccactattttcattaacattgtcattggagaagacttttccattccctatagatctcgtattatctctactcccatcagtcgcgtgtgggacatcattggagatcattagatgatcagcgatgggagtctcttgcatagctggatccttcatagaattttcaacagaatcattactctgtattattccattagacattacacgtcagtcaagtaccggagaatttcttatgggtttccattagttagtattcgataatttagtcggttgatttgatcttctctttccatgttcgcttcctcgtagagcacaaaatgatttacttacgacgacacactgacaccaacgttgaataatgtataaaaataaaaaggatcaaatttttagccaatcctgatgaattataatggtaagtagagggtataaaatacccgtgaggttttctatatggatttttgaatgtaaacaaggtgactaacattatgataaagaattgtgctacgcagggggaaagtttgaataccatagtcttttagaatatctggatgaagagattgaattgattgccaaagaatttcaaacatctttgaaatattcagaaccactttatcgtaaagttacaaaattgatacttatattatgtccagaagagaagatgagaatgatatttgacaagagttgttatacaagattacagttagaaggacttatgaacaaggagatgttaaaatacgtggagttagattttaatgtgaatcctaaagttgttgccaaagcattagtgaagtctaccgctgatcatccaaatgttttttgttataaagttttcctccttttggccaacaagggcattttagcttatcttgcaaactttgatggtgactatttgaaaggattcattgactttagatggtgcctgcagtttatctactatattaagcgactggatccactagaaggtgaaattaagaattttttggaggattgtgagaggatgtttgccatactatgtgctaaatgtctaatgaaggaaattgaagaaaaaggtgataaacagattacatctcaattagaaattttgagattggatgaaggtagtattttacagagtttgttgtttacggtgatagactgtacggatccttccatgatgactactggtaattatttagatcgatacattttgagtatgttctttgaatcactaggtgaaattgaaagattcatagcaattttcaaaggtagtttggcagaatatgaatgtatgcccaatgttaatgacctggcacttagagttcaaagggagcatttgaacgatacgataaggcggtacattttatcgatgaccaccaaattaaatggtgatccagccattattcgctgtatacataaaattctggaatgtttggtcttatatggtggagttcacatgggaataatacaatttttctattcactgaagaaatactatctgggggttttatcagcggcttccgaacttccatttgatagtaaattgactaaagaatgtgtcactctactggacaagatttgccaagagtgggataatgtgaaaactaaaagcaattcaagattgattcaatcgccgcagatcttactgaaatccatgtttggtgaatttgttatagtagatgaggtctttgatgaaaatcgaccactagaacatcatcatgatttatcgattatgttaagctcaatgaaattaaaagttaagcataaatggcttggtgaagctcatacttttaaagaatattcaaattccatgtggaaaattggaatggaatgggtagtcttttggaaagactgttacatagataatcatgaagaattacctttggaaatgattcaaatatttaatggcatttaatagagatgtagctaatgaaacgaaaagtaaaaggtctacataatagcctccaagcaggccttggcagcagcatcgtcgggattattctttaacattttttctaatgcttcgatcttttgctgataagccttgataatcttattcttttcctccatttctttagagaatggcatgtactcatccttttcttgttcaggtacagatgatgaaacactgaaggcgtttctgcgtttcgatcctgtagcagatgcaggtaattgagaaggttctgggcccataaattcacgagaatattctactgatacttttttggataaaagcatctttgttctataattttcgtaaaatacatcgttagtaacatccttcagctcttgcaaatgagatccaagtaaaatgtgcttgagaaaaataaaatcggaattggaaccatcttccacaacaatttgaccccattggtaatttctcacatgtgcaatttcaccacgaggttcagtgatttccttatcaccacaaatgagggcaaatggtaacatgtcccttatgttgacgtctggaatcttctcatttctcccatcacataaaaagtcatcagcttctaccaaactatcctgtagtttgtcatttttaaaatcaaagacgttcaactcatgtttagcgatatcatgcatgatcaattttttgttgtgttgcaattcttctgatgtaagcaagtccgctttaccaatcactggtataatgttgactctatctcccagctgtttcattagctgcacatcaaactctcgaagacctcttgacgtggctctaataaaataaatgcaaacatgagacctactatcggtatccactcggcttctcttgattctaagttcttcattcaagactatatcaaattgtgcatccaaatattcttttattttcccaggtgtagaagtattatccatgcaatcaccacatcctgggaacaaaacgatatcgatcggcgtagatctggcatcatccaattggaccagttcggtcgttaattggatatcaggacttgcatgagcctgtgatggttccggcacttctttaatcctctcttctgtgggaaaaaccgttttaccacataagttattcagaaaggtttttttaccaattcccctttccccaagaacaagcatgcatagcctgtactccttactggcatttctacggcgtctaatatcggcggcactaggcatttgactgtcaactttttaacaatagtttccgttatgttcttgcttgagataaaatatgggaggaaaacagaggaaaataattcgagaacaacagtgaatatttaaatccaatatcaatttaaaaaaataattaccagactttatttttttcgatctaaattgacacaaagtttcattttttttaattcatgtactttagcgaagccaaagtatcaccgccgggaaaaaaaataaataaaaataataataataaaatgggcaaacatatgataataagaaaagtacttttaggtcttcaactttttcttactttgttctaaatcagctacattttccggtgacatcctttttttcgtctccgccactgttctttcataaatgtctctgattctcttatgaatgtgatcctttaattcttgtctcacttcaccagatttaattaaattgtagtcgtaaggatcacttacttcaccatccggtaatggatcttcatttatcaactcatcaatctcttgaacgctaatttgtaatttttctctcttattactctttaaatcaaaaaagttctcttccaaaactctataatcgttaaagaactgtccaaaccgctgtgcagttaccaagaccggaaatttatctctgaagaaatttgatgggaattggaacgactcatctacgtttttcttgtattgtaaaccacagtatattagtgccagagcgacaaaagtataaccatcgcatagtaacgataccggttgtgttacagcttgaacgataaaattacgtgcctcttgtaaaattttggggaagatttgtgtaaagtcatcaggcaaattgtaatctctgttgaaacggtaaaatccactaaacatatcttcgattaattcctttgggttctctaagtttaaatcaaacccaaaacaacacaatatttttttctcattgcttactagcctatccctaacgtcccactttaatttatccaagttttgcctaactctcaatccagtagtttctttgatgaaatagtcacaagtagccttaatatatgcatcgatgggtctattattttccatagtcttgcaagctgtcactaaaatggcttgtgcaatgtgaatacaatctggcaggtatggtggtagtccataaacgtaccagtatctaaagaacagcatgcatgaggccgtataggtatgatcaaaaaggttgagaactttcttgacggtgtaaaaatatattagacatttttccatattgcgcttcaattcagctgtagcctgggggtttgtgcccagtttttcaacaatttccttacagctaaaagtccacgtattatttggcgtctttatcatatcgggccaaagtaaccttgtattgtactcttttctagacggttgagctgccggagctgctggggctgttggagccgctggagctgttggagttgctgcttgatgattatcagattcagaactcatgatgtgatgagaatcaggcacaatggtgggctaggaaatggtattgtttcgtttcagtccgttttgaatggttcccactaggcggactttctgctcgttaaagcgttttgaagtacctaatgcaagatccgggtaagctcatctcatcaacatcaatataccgaattttattatataaaaggtgattataaatttattaccatggcagttttttgtttcttcattctcgttttcttttcctcgttattatatcttttcgtaacatatcctgtttccctgtgtgacaaatgcttttaatctattccgttggattcctttcgaattgttcctgtaatttttcttagacaatggttcctcggtacattctagtgtattatcatttgcttgtgtatcttgaagttcccctggggctgtggtcgctgcaggttccccgttgcaccttgccagttcttcgatatacccttgagaaacgtttctgtctctagtgtcaaagctacgatcggggaaaaagtgggataacaatccataggattttcttttcatcgatttaccttgagagcgagtagtgtggttgacgtcctctgccattagtttttcaaacaaggcagctttgtccctaactttgttggaagatcttaatttatccaaagaattagcggaggaggtagattcacaatcactgattccatgaacagatacatctgatagcgtatttagttcatttatgggagagctccactcactgttggatagtctcggtggtaattctgaaaaagttgaatttgcagatgatttagaataatccgaacaagccggtgaaagtacctttaaagccttttccaacttagcatcccaatcattagggtcgggtgatgttacatgatccgtttcgacaagcttggtatcttcttcgtgaactccctgtaaaattctcatataggacagtgtctcctcgttgttacacataattggtttggcgtacatatccatgagaagttgttcatcattatcttctttctcctgctcttcatgcccttcgtcttcatcatgccgtataaactccaaatccatccgagacatatcaaagaacagtgaatccctaatccaattcgaatgagcactaattaaaacgttcttcgttaatagagcatgatttgctagttgccgcagaaggtgcgaacatttaccaacttgcaccaggtcattcatgtttagtaacgagaatattcgtaataccacatctaggggcagtccttgtaacattcccgttattcctatgttcgattctcctaaaattccacaaaattttctcctggcttttttaatatcacagtattctattatatactattttccaatttagtagcaactgatttaatagctattagtctgaattacagatcttggcaactctagaaaatgggacatatatggtaaatcccatcaagttcggtcttttcagttgatgatgttttggttttgcccaaaaatgactttttttttttttcaacactttcacgtgatctctggtggtactcaagataggtgactttagtaggtttctggtacctctaagcttcttccaaatctccctgatggtcgacttcaattgcagtctggatctctttttgtcagtctttgttcttgttctttgaaataagggttcagctgctttttagcctacatggaaattgaaatttgaaaaaatatttaatgtcttatcgatgcatttgacagcttataaaggtaaagatcattatattgggggggtttcggactttgatcatggtgaatagtcaattgaaatatggtcttctcgggttatattcccttttcagtttagtaaaaggttctgaaggtgttgttggtgtacctgaatccagacaatccatctacgaacccagagatgacgggaaatgggcatgtcttggtgatgcaaatgtgattattgaagccactcaaatcaatgatgggatttgcgactgtcctgatggctctgatgaaccaggtaccggtgcatgtggtatgaaggcaccacaattctactgtaagaatggtgaatttttaccacgttacatatctcagagtaaggttggagatggtgtttgtgactgctgtgattgctctgacgagcaattaaccaaaggtgaggtgttttatagaggtactcaatgtagtgatttgcgcacatcctttgacaaatttgtccaacaagagttggaaaaccatcatcatggtatgcagacattactgcaattgaaagcacaatctccagcacctgtaaagactcaagaaggtttatcagaacagattaggagtctatctgaacaattgtccaataatgaaaagattcttgcctctgagaaggccgactatgccgaaaagctaaaagcagaaaatccattactctatgaatttgaacagttacatgtggatgctcttgcgaatgccgttaatgatcaattgagcgaaattattagagttggtagggcttatgaagatttggtaaggatccttgatgcgttggtagaaaactactccagccatctaatggatttggtcgtcaatgaaaatgtgaaaaaatatcaattttacaagctaaagaagttgtccaagattagttgtaatccaggaaatgacaatgaacaacgtgagcagctgttagtctactttcaaacagaattacctgaattatttgcaaacggcctttctgacaaacccgccaagtatattcagggtaaagctacatttgtggatatgctcattttgagtaaggctgagtatactgaagttatcatggaagccattaacaaattacgttcaatattacaagatgtcgcggaaaattataacagaaactatcaggatcaaggtgtgaggcaagctgcagaggcatttaaacactatactgagaagtatgccaccgtggacattgttcgactaccacaggatttgatggatgagttggatcatttgaaatcatttgtcattgaaaaggctcccgaattagttagttcttcaccttcgcttgaaaatcaagatgaagctggtcaaacgggtgttatgcaacaggttcaaaattgggttggaggaatccccaacttttttaagccagatatgagaggtcaaattgaaaaacatgaacaagacgttagatctttgagggctgaaatggctgctagaagaaaggaattgaccagcttggttgaacaagaatcctcaggtgctgatgaaaggactaaatacattaaagctctcatcgatgcaacaaatctcagcctggagaaaaatcttgatgcttacatttatggaattcagtacaatggtcaaattttgcaaaaagagaaatctggtgatcagaacagcgttctcattggtaatttcaagtcgttgcgtctcaacgaagagttggctctgctcaaatataaggaatacgttagaattaattactctggtgatgacgaactggtgcaacatctgattagcgaaacgacagacgaagaggaggattacctatttggtaatttgtaccaattgaacaatggattgcaactagagtttgaaaacggtgaccagtgttgggatggtcccaggagatctgctactgttttcgtgcaatgtagcgataaacaagaattgaaaaagattaccgaaacttctcgttgtcgttactcagtcgaaatcgaaagtccctttggatgttcagaggacttcatatatcagccattccgcgccgaataaaaatacattatatagaccttaaacttcaaagctatttattttttctattcttcatcgttctgcccaaggtagctaccgccgctcatctagcggctgcgagaatccgcgcagagagtgcgtaaatcctcgatgagcaaactccgaagctaccgtaccacaaggataaggtataagggtaaccaactaatactgatcctttgtaagctttatttgggagtcattaacatattgtcatccagatctctcatcaccggatcttcaagggttattgagtcgtcgagaactaaatcctgacaccctagtcctgtccacaaagagggagtattgtacggggggataaggaggaattctttaaaagccctcggtaatcgtatcttgaccttatgcctctggggaaaaaactgtgtgctacaggattttaacaatgcattggggtaataaggacggagttagatttgtacctgtgagagaagtacaatcggaagatgactacaccatagtcgacaatttggagcaattagaatggtatgctaaaagcctacataaaccttcacacaaaagtaatagggtccttagtgctgtgaaaaaatcaacagagacgaaaattgagacacagacggtttatttcacagatttgaaatctgggagatgtggatttatacaactgctctattctagcgtaataggaggtatctataagggatttcagttgaactttaagagtttccgtagcgaagaaagtgaggagaatgaagaaaaggaatctcgagctgacgtttgggaaagttttaaactggaagatatcaaagaattctcggagttgacggtcaactcatcgcgggcaacatttgcattcaagcatagtttagatagttcagcaatttcgaaattggagataaaggtagatatcccggttggaagtaatactaatggactgaagatcgatttagtggtagatctttaccgcggaatcttggtaaatcctgacgggtgcagttattacctggataaaccactaactaaggatgaaattagcaaacagagagatgcaatattttccaagaagatggtaaggcacttgtttgtacctagagctcaatgttgtggtaatataagttatctcgattcaaaaggtgaaaaagtcgaccttcaactagacaaagttccgggactttatatagatgcggttcaaggtttagttccctataaggctgcgaacaggtggaatttcctctgtttccaatcattgacaacgtctttactctgtatggaattcaccacgaccgaagagtataatcgaaccacggtaaccatttggtgttccactaggaacaaccaaattgaaacagtcggatctagcattaatggcaaaaatatacagttcgaggcaaccactaaggatgacaaaactggttacgaatatccgacacaaattgcattccccatgggttttgtggaacaacatttaagattagtaaatcgatatgatattatgggcgaactaccctcgctagtgaaaagcttggctgaaaacatcgctcacattaagccctatatctatcaatactgtcagtcttcaacccatgccgggcaaaaggggatatctataattgaaagcacttttatatcatcataatagagttacgcagttattgaataagatgtggagccctccaatcggctacggtccgttctttattccaatcttgctgagctcttggaaatctgtacacgaagtgtctcatagctctttgattaggatcaaaataaggttcaatagattcttctccggtgtctgccgtctgtgaaggccaatcgatgtggctgaagggaaacgcacctgtaaatttggcaagactctctgctaggtaactttcaaaagggttaaagatactcgcttcaaaatctcgatcacatttaaacaatatccacggtttgccgaagccataactgttaaagtcgtaccctaagaatgtaatttcagaattttcaaaataagtcggtggtgccattcccacttctactaaccgtatttcaaatgggcagaaataatggccatttatcttatgatcttgattattcaggaagatgtctggtagatcccccaagttaaagcagtatacacctctctccttgataaaatctgccacgtttccctgggtgctccttttcttgtaagcaccatactgcgattgtctaatttcagtgacaaaccctgggaccttggatgctgctattggtttatcgatgaaaaaccatgcgtttaaaggtatgctgcgaccagtcttggtactaataatcccatcgtggcaatcaacgggcactacacattcgcctgcatagatgggcttctgcatatcaagggaatccctctcacataatgcaggactgttccaacatttcaacggacaactcagtgcactgtaaatgataaaccatgagtcatcgataaattcctgcgtatcctttgaggttctgtaaatcattctagcatcttttcgcagaaagtctaaacttttgatataggaagcaattggattcttcaactcactccaaaatctttcctcctcatcgacagtatccactatctgcaatgttttttccctgtataattcgttgtgtaagtgataaaactttctgtttaccagtctcaattccagaggacatgccagcagtagtttccaaagaatctccagtgggaactgatccaattccattgcttatcgaaccgccaatatgagctgtgttgcgcattgaacattgtaattctgaactcatcgcaccttcttatcgttcatgatccagatcacccatttaaaggtcatgtgctctgtctccatgtccttcagtagaaaaaaatagttgaaaattttcccttcacagctcatcttaagaacctttaatatgcaaacaagataaagaagaagagtcttataaaggaaaaaagaatcattttgaagttgtttaaaggtgttagatagattccttgggtagaattacctagtatagtgttgattcgcagggttagaaacttttttatacaaaggaattgaaaagatatagaaaaaaattaaagaaaaaaaatcaatcggttggatttggatagagtaatatttgagcaagatagattatatcattaaagtaatattaagcagaagaatatgacagagggtagtagctctcgaaaaagtcccttatatagtggacaagtcggtaaaaaattaccaggacctttagcaaagaaatacccacagaataaccatttaggacctgttacgaggcccaggcgtttcagtcttttatacagttcagactcttcagtcagtgaaggatctgatgtggatgagaaagatgcagaccctaagaaacaagagagaagaggaagcgacagagctagaagtatatctagcaatgctggaggcaagagaagtaaactgatacgtcattcatctgacatccaggaggaagaagaagaagaagaggacgatgatgacgatgatgacgatgcgaacgatgatgaaaatgacaacgagaatggcaatgagatttccgtacctgaacaagctgtctccagtgatgacgaggaagtaggtgatgatgaggagtccgacgaggatgatgatgatgatgatgatgatgatgatgatgacaactcagactccgagagtgaaagtaatgataccagttcttcagaagaggatatagattttgttaaactgcaggcacagagaaagaaaagatctatgaaggcattgtctgctttgaaaagagatggttcgaatttaggtgaagaaagagattccaaaagattggccacggaaagccggcaacctgatagaaaaactgaattggaacctattagtcctatattggaaaatgagcaagctgtaagttccactgatggtagtgacatggatgaagaaaatgtgaatactgaagctttatcgtttaaatttagaaaagatgacgacggcataaggtttggtaaagttgatgatgaagacagtgaagaagacattggtgaagaagtacaagatgctgatgatacctctaataacaactccctagaaattcagccagacgacaatctgaatcaactgcatgtaccgcacttctcagattcagaagactcggaatacaatattgaccaagatgcatatttcaatgccatcgaagacgaagacgatttggtaggtattgagaatggtttagatcctaatgaagatgaggatggtgatgttctacgtgaagaagaaaacatgatatctgcattgcaaaatgacgatgatatttcatttgacggtagcataagagaatctggatctgatccagaaacgatgagtgtatcagcggcagagcagaatagatcggttgatggcgatgatgaaagtgatgatgaagacgatgaaatgatgactgtctttgatatgccctttttcgaagatcccaaattcgccagtctttactactgtgaagatggtagtgaacctcgactcagtctttccacatctttaccactgcttacctctgatgaaaagatgctaagaaaaaacagaagggaagctaaaaagctagaaaggaaagagcgtatacagagacgtaaacagcttaaagagaaacgcagtagagtaaagaaatcgggggtcaagaaggcaaagtccgattataacgatgaggaatttatgttcggtgtttttttcaacaatgaccaagacgatagcgagagtgggttcaatggtggaagcctagagttgaagaagaaattggatttcgattcgcccttgcgtcgtttgggatctgcggctgcttctgatatcagttctgatgacgaatatgataacattttaatggatatcgctaatataccttccagcgatgactctgatgatgagaagattaccaaggataaaaaaggccatgaaaatggtgaggaaaaaattgatgaatccgttgaatcaacatctgatgggttagaattggagcttggagagacggacgatgaattgcaagacgattccagcgtgagcaatgtgtttatcgacattgatgatttggatccagattcgttttatttccattacagtgaagatgatgcatccacttcatactctgaaatgatgactgatgatacagatgcagacaagaaagaaaaggaggaggatagtaaagaggatgccgtggagaccgtgacttatgccaatgacgaatccactgatgaggacgataatctaccacctcctagttctagaagtaaaaacattggtaccaaggctaaagaagtcgttagcgcaaatgttgttggcttgaaacctcctaaacttggaacttgggaaaccgatagtaaacctttcacgattatcgatggtctttccaccaagtccttataccccttgatacaagaacatcagcatttattggaacaacaacagagagctcaatcacaaagcccagaataccactcccctcatgaagtcacatctgctaacggtgacgaattgactttgaacgaacttttgaatatgagtgagctggaagatgaggaagcacctgctccctcatattctcaagcggcttccgattggtaccaaagacctgcagttcccctatctgcctttaggaataaaggtgtcaattcccatgaagatgatgaagttatgttgcctgccaattccaccagaaaagtgcccattggttatattgggagtgaacgtactagaagaaagatagataaagttaaagaattacaacggaagaaaaacgaaaagaagagaaagttgaagaagagaaagagacttttgaaattgaaacgagacaggcagcgtgctgaaaaggagaatggtgtacaaagtcatgaggctattggcgtagatgaaggagaggcatctctacaacttccagattctgattttatcatggatcgtgcaattgaagatgcacagcaggagaccgagggacagagatcgaggaagaattccgttaaaagcgttggtctggcagaaattcatgaaattttggggaatgacaacagtgatctcttagagaataacgttgaatttttcgatgctcaggctgaagaagatgcagcagccatggaagtcactgatgcagatatcctggcctctttaacggcaccagtagatctcaacgatgtgggtcgtcgtccattttggagacgtcggcaaagtatggtggaagcagcagcagaaaacctgaggtttacaaaaaatgggttatttagcgaaagtgcgctagcagacattgaaggttttttcaacaatagtggagtcacatctaatgcttttgaattcaatgagagtttacaatgatagatggatggagttaattttcagttattttttttttttaacattatttgggtttgtttattttatttttttttttgtttgttatctttttcttataaacaattgtattttatttattgcattttttcaaaaaagtgtgaagtattccttagtatcaataaatggccttatagtccatataatgtttattcttaactttaaaatatgcatttttttatatatatatgtatttaatatatagtgatgagcatttgaactttttttttcagcgctctgtagtaaaggtgaaaaattttgagttcatctcatctcatctcatctcatctcaaagaacaaagaggacagaattgtagttttcaaagattcgcaatggatttaaaatcaagttattcgaatactgcattgaatccaatatatgcaggtagtggtgctgtcgctacagtttcttctgatggttcaatattggctacacctgtacttgatgagattaacattattcagttagtccctgagagaaaaactctgttcactattgagaatgatgatgagcaagatattacagctttaaaacttactgccgatggaagatatctatgtttcgcctcacaggcacaacttttgaagatatttgatcttagagaaggtaaaatagttagatcgatgaaaatttcctcaccctcctatgtggttgattctgattctacctcgacacttttagctattggtggtactgatggtagcattactgtcgtagacgtcgaaaatgggtatgtaacccattctttgaaaggacatggtggtacaatttccagtgttaaattctatggtgaacaaaatggtgaggtttggttactggcgtccggtgatactaatggtatggtgaagatatgggatttagtcaagaggaaatgtattcacaccgttcaggagcatacagcggctgtcagaggtatagatttccacgaatccaagaacaatgacgaatccgaattatttttaatttcaggtggtagagatgatgttattaattattggcaatttaaccttaagaaaaaatgtacattgttaaaaactttaccagtaagccaacaggtggaatcatgtggatttgcaaactctgaactcatatacactgcaggtagtgatgctttcttacaactgatatccctagagagtggtaaagctgtaaaaagaactcataaacctgtggaagaactctttactgtgggtgttttatccatcttgggtggttccaaattgtacatggtcatatctgatcaaacattggcattaataaatttagaagaagcattggagagtgaaagtgctttaatagaagttgaatcctacattgccggtaaccatggtacaattgcagatatgaattttgtgggacctgaacttgacaagctggccttggcaaccaattctccaaccttgagaattattccagtgtctatggagggtggtttacctattgacgtggaattgtacgaaggtcataaagatttgctaaatgctgtcgacgctacggaggatggtctttggttggcaaccgcttccaaggatagtactgccattttatggtggtatcaatcaaattccaataaattcgtaccgtatgcaaaatttgaaggtcattcatcagcagtgactgcagttggcctaccaaacatcatgcataaaggttggccagaatttatcttaactgcatccaacgatctaactgtaaagaagtgggcagtacctaaaccagttgcttctaatgagagtttcgaattgcaagtcgtcaaagtatcagaatacacacgtagagcccatgaaaaggatataaatgcattatcagtggcacctaatgattctacatttgctactgcatcctatgacaagacttgtaaagtgtgggatttagagtctggtgaggtaaaggcaaccttggcaaaccatagaagaggtctttgggatgttgcattttgtcaatacgaaagattaattgcaacatgctctggtgataagaccataaaaatatggtccctagacacttttgccgtggtaaagacttttgaaggtcataccaatgcagtacaaaggtgctcattcatcaacaaacagactcagttagtcagtagtagtgcagatggtcttgtgaaaatatgggattgtagcaccggtgaatgtgtgaagactttggatggtcatactaataggatatgggcgctatgtgttgccgaagatggtgacctgattgtaagtgccgatgcagacggtgtgttccaattctggaaagatagtactgaacaagaaagacaacaacataacgagcaacaacatttgaaagtggaacaagaacaatctttacagaattatctatcacaaggtgattggaccaatgccttcttacttgccatcactttggatcaccccttgagattgttcagagttttgaagcaatccttaggaagtatggatgatgacgagaggaaagattctaaagtaatctttaatagagaattggaccagacaatttctaatttaagcaatgagaaattgttgctgttgatgaagagatgtagagattggaatactaattctaggacccacagtattgcacaaagaacagttagatgcatattgttacagcataatatcgcagaactaagtgaaatacctggaatggtacaaatcgttgatgctattttaccttacagtaagagacattatgctcgtgtggaaagtcttgtcgaacaaagttacattttggattatgcattggtagagatggacaagtttttttagtagatagaagttatatatttgagttaccgctgtaaaatatcgtagtgcggcgctatcaaacaacaacgttaccctgtagatgaaaaaaaaaaaattgaataagcgatgagatgagatgagcataagaatgaactagatcaatacagaagagtcacaggaataacggtattcatatcattgatcaatggtggaaagtgatattagagctgctgataacgttgctaaaaagtcgagaagacggaagaagagaagaaccacagaagtatcggattcttcagattcttcagattcttcgtcagaggaagaaacaaaggcatctgatactggtgcaggtgaagcactccaagcagcctaccagttatcagaagatgaagatgaaaaaatgccagatgctagtgcaaaaccagaacgtgaaacactatctagaaacactaaggaatcgttgaataatattccatttacaagaactgaactgaatggtaaatcaacacgaaataatgatgatgtttccatggatttacaaagggttaacgaggcaattaatgatgctaaacagaagatccgtgaatcgaaagaagaatcacaatctacatcacaactgaaaaattcttatttggaattactatttgaaaactacggtgatgatataaattccttaagagatgcacctgattttacaagtaactcattaattatgattgcacaagttcttaaagatggatcttctatgttcgacgtggaaactttgaagaccatgttagaaacgaaataaagataaaaattactaggggaattaacataagtagatagaagaccttcggttatatttatatatgtaataatatacatttaggaagagagaagggaagattcaaaaggaagggtcagagatatggatattcaaagaggagaattaaatgaatgaaagatccaagtaaactgattcgagggcaataacaacaacaataacaacaacaacaaagataataacgataaggataaacttccattaaccttcctttcctcaaccatttagaaagaaaaaaaattgcatcaaaacgatgattattgttatagaatgactagatggtaaaatttaatttgattcgtttgtttgtttttgtgctttttctatcccagggtcttaactagtaggaaagcagcaccagctgccacaccaccaactacgaccatttgtaaaccttcagaaatttttttacctaaagtacaagcatcactcatcgatacttgagtctttatgtaaccgaaccaaaatagagtaattcccattactataatcgaccatattaaacctgttcccacttgctggacaaagaaataaggtaacaatggtactaatccacccattagataacctccaccaattgtaacagcactaatcaattgtctattttcggcaggttcctctagacctctaccatatctgataataaaatcaaccattagctctggggttcgttgtaagtctttgataaatgatagaattgtgtcatcagaaaaatttgggttaatatctaataaaatatcttcgatttcgtgattgatcatagttggattatcgtaaaaggcacttttctcttgtttgacttcagcatggtaataatcaccctcagatttagcacctaaataaccgccaagacccattgatatagcacctgaaattaactctgcaaacccacccgtaataactaatttagaatcacctaatgatgacaaacctgccgttagagcaaatggaacagtcaaaccatcacttaacccaatgaccaaatcactgattacacgagggtctacgttattgaacagtccaccattactattaccattacgattattgttatcggacgaaccccccaaagtatcagcgtctctgtctgaacctgatgaattatgtttcccattattattaccctgtgaagaagttccgttaccattttctaaatcaccgttcgtcgaaccatatgcattgtgagaagtgtgagaaccattatcgtttgttagaaggggtgctgttttacctgaatctttcttcgaagaaacatagtccgaaactgcgtttttaatagctactattgacatttcgatagtttcgtctaaagtctcagataacaattattatatttctccttattttcttaccctattcttcttaccttcaaccttattatcacaaagtggtagtacgcactaatacgatatattgaaatgagcaaatcaaacttcgaccgttgatactgatcgcagtatacttaatcctataaccggtaaatgataaataactttcgaatttacgacatatgaattatacgcaaagtttcttctaaatctatattccttttatttgatctttgggtactatccggttcaccacaacgagaatctcccttgagtggttacccggtttagatttttgcggttagccaattaaaagtgcctttattactaaggcatgtgacggcgtcgagcagtagtagagtataaaataattagccgcccaaggtatcgatattatcacttctgtctctttattatgtgagaaagctccaggctcgttgattatacctacttatattgctaatatacatattacagaaagaaaaaaaccctatattcattaattcttacaattaagcctgagttgaagaggagtacttggtaacagctctagtaccttcggaaacggcgtgcttagccaattcacccggtagaattaatctaactgcagtttggatttctctggcagagatagtagactttctgttgtaagcagctaatttagaggcttcggtagcgattctttcaaagatatcgttgacgaaggagttcaaaatagacatggacttttgagaaataccagtatctgggtgagtttgcttcaaaaccttgtaaatgtaagaggagtaggtctcctttcttgccttgttcttcttacccttaccttcgacagaagatgcggttttcttggcagctggcttcttttcagctggggccttggaagcgggtttcttttcagctttagcagacattttgatttgtatgtgttgtgtttgatttgaatctaatggatcaccgggtgggtagttgtaaggatcgattatcgtgttctataccaataccttgtctctttttataccttttggaatcctttgttaaattaaataccgtacctattttttcgcccctgggtgtgaatttttcagaatggagttaccgaatgcggtagtacggaccgatacctatagttaagagaaaattaatttttcatcaactacggtcacttttaatagttcttggaaccgaattccaacgttccagttatttcacaccgggtgagaaaaaaatggaacaggggattcagtcagtggcgaattcctaagggaaaggtaacggtataaaaggaggaaggttactggtgagatacatgatttctttactcttacttttctacaacacaaacaacaatcacaaatacaacaaatataacaatgtccggtggtaaaggtggtaaagcaggttccgcagctaaggcttctcaatcaagatctgctaaggcaggtttgaccttcccagttggtagagttcacagacttttgagaaagggtaactatgctcaaagagttggttctggtgctccagtttatatgacagctgttttggaatatttagctgcagaaattttagaattggctggtaacgccgctagagataacaaaaagacaagaattatcccaagacatttgcaattagccatcagaaatgatgatgagttgaacaaattgttaggtaatgttactatcgctcaaggtggtgtcttaccaaacattcaccaaaacttgctaccaaagaagagtgccaaacctggcaaggcttctcaagaattgtaagggtctatataatggttttttttattttattttataggttttcggtttgtactatagtaacgagttttgcgtattaggaagaaattttaattgtgtcttaagacttgcgtggattgatattattggagtgtgatatcaagagttttagtgtgtcaccgttttgtttatattctgaagtaaattattatgacttagtacacttgtgtaagcgagtcgaaaactgagttttaacaacaagacataaacatcaggagaaagaaaaagatgaaaggcagttctgtagatattgtacatagtctttatggaatgcacaaatttgtgcttctatctgaaattagcaattcataacagtctaaatgttggttccagcagacgcaaaactctggagcattttcttacttgataaagatacatccttctcaagaaatcgtagagatattagcttctatggccaagttggtaaggcgccacactagtaatgtggagatcatcagttcgaatctggttggaagcagagtttaactttttatatttttataccgctacggagccactcagctcatgttacgtccgagatgaaagccatcacacatacttttgttcatacttaaagacaacaaatcttggcactattattaataatacattcatttagataaaaaaagaagattaggttacatacaaataaaattttgggattcgaacgattaaaaatcccctttcgttcatttcttgaacaatttcttgaacaaattgcccttttgctctttagcttggccttgggcctcttctttggtcttgcctataactttttgaccccatgaactatccttggcctggttcaatttatcctggacgccttgacggtagcccataccttcttgaccaccttcaccagcaacgtcggcagcagcggcactgccaccaaggccgttagctttctcagttccttcagctcttccagctctgtcatacccactttcatactggctatctctcaatccgtctgcatacccatcggcaaaaccttcatcaacaacgtgttcggtatcataattggaagattcactggtttcttcaagacctggagcagcggtgccaaggtgattattaggttgttgagcagaactagcagcaggtgcttttccagatgcaacaccaccgtcagtggcactggcaggttgagcattacgtctccatggatgagaaccaccaccgcttcttttaccgacacctcccgcggcggcacctgcagtagtgccagcagcgacatcaccagtagtggcaccggtagtaggaccagcagtagtaccgatagtaggaccagtagtggcaccggtagtagcagcaccagcagtagcaggaccacgagcgctaggaacacgggcgctaggaccacgtgttgcagcgccactaccaacggcaggtgcatgggcagcagtaccatcatcaacaacaccatacttagcagtagtactatcaacagcagcaggaccatctgtagcaagaccgccatcagtggtaacaccgcctgcgccaacaccattacctaaactggcacccctttggtgcttagtgtatgggacagaaccttcaccttccctcaaaaagcctgcaccagtcttttctgctttttgttgctcttttaccccgcgtggaggttggtaaccgctattttcagcaccaaattcgaccactttattaagcatggacttcaatttattctttggacggctttctgaagtcttaccctcatattgttgagctttgtgagctgggctataaccgatttctgagtcttccgctccagcttgcgtcaaatctgttttgggcagatcaggtaatggttgctcatctggtttaccaccgaacaaagactttctagtcttaaaccttgagagaccagaactaaatcccttagatttacgcctactggcaggctcgacaccaccggcagctgcggcaccaccaagcccaccgagttctgcttcactatcgaaaccaccacgggctgcagaatcttccaagggagattgaataggggattgcacagtttgctgttttcctacttgtgagcgcaaaggagaacgggcagaagcgcccacgttgttggcaccagctgcttgcaaatcacctgctctaacttcttcaggagatgcaataggattagagaacccactcttagtagtgtcgataggggaagcaagaccggaagcaagaccggaacgtccagagtagccgctgacgcttcttcttggttgttgcaaggctccgtcttgagcaataccggaacgtctagaatagccactaccacttctttttggttgttgcaaagcttcgtcttgtgcaacaccagagcgtctagagtagccactaacgtttcttttaattggtgctctctcttccctcttttcgtaaactggttcgtatacttcttctgtttgatactcaggttcgtactcaggagcggcttttggtaaacgctcaggatccacatattcccgctcaagctcgggctctatgtactcaggttcagcttcaggctcaggttcttcaaaatcgtagcggtcgccattttcgactggataatcgtaattaccgtaagcgccaccctttggacgagcgtccttccattcaccgtcgtaatttttagcatcttcaaagttttcctcgtagttttcatcaatcgtctgagctggtgtaacgaaggaggcagcagcattactttgaggtgagcgaacatccttttccacaccgccaagatttaaaggttgagttcccgattctggttcctcaacattacgttgcgacttattctgggacatggccaatgcctgaccatacatctcttcatccgataagttccttctcgaagctgtagaagcagaaacagcagtaggctcgacgttttgtcccaaacggttatctaacgacgaggcaccagaagcacggggagcatctgctgcaggtaaagcacctgcagctccagcatctctatccttgttgaatagagtaaacttcttcttgcctctaccgctatctcttcttaatgaccgttgacccattctggaaggtgcttgtccatcttgggagctagcgctgtcaagtacatctggcgagaaatcgctgccgctgtagacattacgttgagcgatttcgagagctctagcatacatttcttgctccgtcaaacgtctctcacctgcagcgtttgcgacaacggcggactgtggcactgaaccagctttacgaactgatcttgtagatctggaacgcacgggccttgtcgtactagtcgtacgacgaactggggcagcagctgggggcgcaaattctgattcagcttgagctggttcttcatattgatagtcttctggacggtgatatctaacaggacttctgggtggacttataggacctctttgtgttcttgtactccgtacactctttggtgaagatggtgcagtttttttaactcttctaactcttcttactgggtgctcatcggcataattatcaacgggttcagaaaattcgttaaaatgacgagcattgtcttcatcttctaaaggtgtagtggtaacggtctccatataatccacgccgttgatacgtctgatagttctccttgtaatactcttcgttcctttagtgtcttggaaatttgcatccctcataatggaatctgctctaggagcctctctagcctctctagcttcaacggcacctctagatttggtacgaggtcttgttctaacaaccctacgtggttgtgttagagattgagagcgctgttgtactagaactggattacccctagaacgggatgcagcataagcagctgccgctgacagacgtggagacttgttatagtcgtccttgcgctggtagtagtagtcataacgggaaaggtctggaaccttatgttccttacgttgcgtaagaagacccatttagttcggtttcttagtgtttctgagtggcttattagttataatcctcttctcctctcagattaattaattagcttatggtaaagtgaagaaaagaagaaagggaagttttaagttttcttaggccgctggtagaaaacgtttcaagtttcaggggtgttggcatcgggcagtccctttatatgtatgtcccgttagttttggttttactctttccggggagttttgcttttctcaaaatggtttcctgaaagcaaaagaagaaaacgaagagggaaggccgaaaaagaactagggttaatatgggtacttcatctcctacctatagggagaaacacacaattgcgcagaccactgttgctaaggggaacaatagaggaaaaagtagtgtaaaaaattaactcggcggttagataatcttgtcctgaaaagggggaaggggatgatacatttcacgtgtatttggcgtgatacacgcattacgctaaggttcttctcttaatgacttgaaagcatcgaccatactcagtctctgctggaatatttacttgtagccaccatcttgtttcgctcttctttggctagccttgttttggtttcagatggggaattatcggtttgataaacaaaacgtttaatgaaaatctgcctcgtttcgcttcaccgagtcaaccgatcactaaaaccgctatttccgctttactctcaatcatgatatagtggaaccgcgaaggtatcattccaaaaactgctaaaccgccgagctttttaaagcaagaaaactttcgccctttatatactacctattttcagctttttttttctaacccttaaaaatagccgccgttgtactccacttcaacgcggtcatccgctttgaatggcaaaagagtctaccgtaaaaatgacctaaagcttgagtttgctgagcggctagacagcccaaagccaaacatttgcatcatcctttgtttaatggataaagttaatgtggatcaatttttttcggatttctaatcagataaagtaataatcaaatcgttaagtacgtgaagattttaaatgaagatttataacggaagagacgccttctccagattcaggccatatgagaagggagagagagagagaataagcaagaggagagcaatgttggtaatgtaattgccggattccaaaccgcaaactttggttacatccaagaagaatagatccagtcacgtgacagctacaccgttttaccgccgagaccaaaatctggtcaggaaaaagtgagtattactcccaaaagcttacttaatcatgatactttagcttctcgatattgttaacttgtctataaatcctttcaacgccttgcggctgggcgaacaaaagtttctgaaaacccgtgcaccacgattatcgaaccaatcgaggtatccgaaccaggtcaaaacgacgccgttgctgcccatactcaagtaccattggtttgagaaccgccgcattcacctggctatgcatttatgccgactttatcactttatcactttggcaagtaagaatacgacacccgtacaccggcgaactacacataccaacttttcaatacactgtagaaggccactgcttttaaccatcattggcatctctgtatctgcgcgctcagtttaagcatacaagcgaggcccaaccgcctgcgggcttgaagtaaactctgacccatctgggacatttcttgagagctattgcacgactacataagtatccatgaagctttcgagagtgacatctgctatatgtctagctaaaagcctactacttatctaggaaagtcacgtgaatatatttgtttcacgaagttatttgcaatcctagtaggtataggttaattgaagtgatgggaatatcatcaactatcttccagggttactatatagtactgtaccgtattataggtatataatttctttttttttatttttttttttctgataaaaaatttggggatccaccgttgcgtctgtggtctcccacttttaagctcacacgtttaaacaaagggaaaacttcagcaccaagattaagagttccagataataataggttcaaatagataaccataatgagcaaagaagacgaagctgctgctcgtaacattaagctcgttagatatacacatcctagcccacaaaattggaaaggtaaagatggattggaaaaatcgagatcgctgccggttcaacacaagaagaaaagcgaaggtaggctaatggatatgttgaaatctagaagcgccaagtttcataatcttactgtgaatcgcagtctatcagcgggacctaaggacacacgtaatggtgttaaaaagaataaagagacatgctttttacctgtgagaactccaaacaccgtttctcgtccaaacccaatttctccaagtgctgtacaaaagttgaatctggatacacgtttaatcccaggtaacaattcttcgaatcatggatcatttacttctaatgttaagaaaatgctagaggagcaacgtcctcaattgaattctatacaaaagcaacaacccgtaccgcatacatcgtcaagaagtgccaatactactcctaaaaaaaccgatgggacttttcaaggggagagggtcaaatcgccacaattggccaaatcaccacaacaacagcacttaaagactaatgataaaaaatctgagcatgaagatggacgtcaggtagaaaaagaagccgaccataaagaggaacaacgagaggaaaaaaacaaagaacctctgccgcaaacccatcctagtgaaagaggaaatagcatacgaccagaacgacgtctggatgaaaatccacacagggatcaattcaacaaaataccgtcccagcggcaagatcgccttgaaatcgaggccgaacaggctgctgaacaatcacgtccaagttcaacggaatcacgattcaacgatgagactgcttcgtcttcaactgagcgcacgactcctcaagctatagaaccggaaaatcgacatgattcaattcgatccggtttactcaaattgtttaaacaagtggagactgagaatcttgcatctgatagtgattcaaattttagaattgttcaattgctgcaaggtaaaagaagtgaagcaggggaacaagaggaacaagaggaagaagaattcgaagtttctgactttgatgaacgcgatcgttcacttcaagggagtgtagtggcatttgaaggagaattaggaccaccagaggactcaggaacttcacgccttgaagtggtttacctatccgacgaagaagaagaaaaaagaccaaggcataaagtcctgccgcccagttcaggtttattgaggcctgcaagtcccaggagatcgattccagctatgaaagatcctatggcggagaaacgtaaaaatgatcgtgaagtagctgtggatgcgcttgctaaactgaaagacaagaagacttttgataaggatacctttacacaaattatagaaaaaggtgttgctgatcacagagctcttgaaggtaatccaaatgttagtgtaacgaatgacgtttgctcagtaaacaattacgaaacttctcatgcctattactatcaacaatttgatagaaggtctaaattagcatggttatcattacatgaacccacaactagtactgggaatgagccgctcaaagagatttggaaaagtgaactattggcaaatttcatgtcgtgtacaattttcttccatcctataacttcttccaatctaactgctgatcaacaaagttccttggattaccaaatcagtcaattgaagaaattgttgcaaaataaattctacatcaagttatcgggatctttggataaaagagtggatattgtgatcttatatggtcaaaacgaaaaagtgttgaatgaacttctggaaaagaaacaaaattcttcatttcgtgtgtggtcactccaaagagctttgaactacttacaggacgttggaattgatctacaagagtggaatatagagaaagacgcgcaggatcgtgaatccatcttggatgtcccaatctctgaggattcgattcaagaggatattgaagattcgaccgaagaagtagaaagggaagggaataaagaaacagaaagagaagaagaaaatgaagaaacgaaagaaggagaaagggaagagcataaagaaactggaaaagaaaatgcagcagaaagggaagagaataaagaaactggaaaggaaaatgcagtagaaagggaagaagagaaagaattagaaaaagaggaggatgaagagttagaggagaaagtggaagaagaaccacaatctgagaagagagagcctaacccggagaagaatgcaccaaaactatcgaagagtccaccaaaaagagtggtcaaagcgaaatcttcaagaaaaaaggatgcatatgttcaagaattattgcaacaagcctctggtgccctggacaaaagagatgcccaactaaaagctgctcatagcattatattagccctctcgagggatgtcatgcatcaagaagtccaaatcacgtccctaactgggcaattgaaatattccaagaaggaactagatcgccaaactgagcttgcagaacaatatagattatgcatggcggagcaagaagtcgaaatggcacaactgcgaattcagttggcaaagaaaaaatccaagaaaaatcgccgagcatctccaaacccttaggagtaattcttaatgatcaagaataaaaaaaagagacttgtatagcgatatgtagtataatctgttttttattttttattttttattttttcattttatttattttctgtcgctgacatctcgatgcttcttgtgcgcgaaaagaaaaaaaatgggtgaggaagaattgtttaggatgcaagcattttataccgaccatgctctccgcatctaaacgttccttaagccaatcagtccatactactggcttaattaggttctgccatggatggtaataaacgaagaggctcacaagattttgaagatgatatagaacctttaaataagcttccaaagagcaatggtaactccaataatattcatgaacaaaattcaggcagcatgtggatttattccaatgtatctatgaaacgcaaccgaatagtagaatctgataacaacccttttttaaaatcccaaaaatatctgaggaggattttatcaccaaaccctcagagagacaatggatcttcgatgaacgatgcagattcaggtgatgcaagaaattcgaataaaaatttggcccaaagtcctgatgctgctgtgaagccaattgatgaatcattccgtgatattatgaatcaattaacaggtgaaattatgaattacgaggttaaacttgctagtttatacggcaaagttgaagaaatgaaaacggaaaatgtaaagatacgaaatcggtatactctaatgtgtcgaggagttgtaggtagcctaggaggttccaatgattttgatcaatcagtggatacagaagaatttagctcagatgatgaaacctgtgcatctgatgggactgaggcctgtgatgagcccgaaatgatgaatgatggtggtaaaaacgaagaatttggagtaattgtaccttctgaaaggttttcaaaactgaaagacgagctggacacactagagactcgtatcttgaatagatttgaggaacttcaagagaatcaaaaatctacgaataacacatcccccaatgatcttgagaggttgggggtaaacctagaagatattccactcgttaaaaatcttcgaaccgatttgagacgttcattagaagaattaaaagaagtaagaaagtttacagacatacgtgtttccaacttaaagagcacattaacttcagaaagaaagatatcagctacggctcgaagagattttgaatcaagtaaagtgtacgtgaaaaatgctgctgattttgtcaatagagccaattcacacatagaacagtacaaactcgttaatcagacgcagcataatgtgattgagtcactgcagagacaattagccaatgtgcaggaaaaaattaaaaatacccaagttcagtctgcaagtgatcagaaaaatgttagtgatgagtatcgtttggtctcagagaaatatcaacgcatctttacggcttatacagtactcaatagcatctcacaaaaacagaagagtgatgtagcccttttgcatcatctttacgaggaagaaaaaagaaagagtgtttctttaattgctgttgtggaacaacagagaaaacttatgaatccaacaagatatatgggcccaatcactgcttctgaagctttaacaaggctttcagccctatatgataaccgctgtgatgaaagtgcaagggaggaacgaacgaatttagctagaatggcaactattcacgtaatgtacaaaaacttgctggatcaaaaggatagagagcatcaaggtgctatagaaaaccttgtgagggaactcaacgaattgaaaggtattaatactgctcctcagaaatctgacccatcaggccaatctagagatatttttgacggcgacgtcgatcgagctatggcaaacccagaacagcatggtgtttagatcaacccggctagatactatgatagaattctgcgcaattataactataaatgtatatgtatacatgcatcccgataaacgtatttaagttttctgatacagccgttcttaagatggctttaaccgactacgacagaacgaagtgattactcataaaataaaaatcatgtccctatataagatgaaatttcatgtaatccatgcaaaatactattacatcatccacttactagatgctttaacttttctaaatctagttggactacgttagaaccgctgttgttcttaacggcttcataataacaagttgcatggaagtatttaccgttcgcctccattgaatttttccagacccattctcctaagtcttcatcatacagacctgttacagcatccttacagatggggcactggaaggacatatcttcagctaattcaggaaccacgacgtacttcttccgtagaatactttcatcaacggccacggtctctggtgatttgatttcttccactggtactgaagattgtgcattagtcgattgtgcatctaaattcgctagagttaaactttcgtctgttgtacgattggtggaaacaatctcttcgtctttgaaatttacccattgtgaatcatgcaaataccaatttctggattgaatattcttttgcgctgctgttccccccagacctgttcctgaaataaccgtaccttctgatcctttcattcttttatgaattctaaaatgccaatctaagtgttccgcctgtaatctcttctcttcaacgtcattaccaaaccttttaccgcatacgttgcatttgttaggttttgctctatataagagatgaaccaagcagttgttaacaatcggattctcgttggatatcacttgttgagagagttgtaaatttggagtatttaaaatgtccacatgaacagtagcaaaagatgccttacaatctgctaagataccgtgtaagaaatccatgggcggcaagggcttgtgcgtctgctgctggtgagttcccaacccattttgatcggcgcctaatcttgaacaaagtgttacaatagattctttgggaggtttataaaccaaaccttcttcatctagtgattgatataactcttgtaatttggtcttcttactctgcctatcaaattctgaaaagtttaaaggcgataatatgctctgggggccaccaaaaagagaagagacacccctaccaatattagaactatctccaaatagcggaattaccgattgaccataaagtgggttttgctgttgattctgattctgattctgatgctgctgctgctgctgttgatgctgctgctgctgtagttgttgttgctgctgctgaacgaactgctcctgttgttgatgcctttgtctatcttgcaaagtttgttgatcttgagcaaaaatctgtctcaactgcatctgtaactgtttgagagcaccagctgtcaatttttccctctgtaattcctgctttaactgagacaagaccactaatttcatatttaacttctcatcttgcggttgtgctctaagacgttctgtagataatgctgtcaatttatcaatttctctcatgagtaatggtacagttggtgttggtaacatggactggaaattcttttgatgtaatgcacttgcctttattagaaactgttcaatcttttccaatgctgttttttcaaaaagtggtgagtacccaccagtagattcattgggtaccatccaagtcttaaacatattaattagtttagttctagttgtattatccacaagtaaataagtcctcctgtaaagtgaaaacaagtttctgctaaaataaatcgtatagggactaccagcatttttacagatagaatctagagcataaaatgcacaaagcttttgttttggtggacatctttctagtttggcctctaaggcatctacaaaatactgagcacaaggaatgttctcctcggcaatcttggtaagtgtagtgattatgggccttgaattgaaggtcaactcctccaatatactggtaaaatccttaaccactatttcagcctccttatccatgataataaaaccctcctactgctatatattctcactaatgtgtctagttgattgcacttgtaatgaagcgatgcctttaaacttcgacatatgaatgtgttctgataaacccgtaaaccacagcataatgtgtaccggaaatcgatattgggccataattggctttaaattccacatttagcagtactataccattctataccatctttacctgcattttggatggtctaagctccctaaacatatcatctttaccctatagtggcacgattccctcttatctacgctatccggtcaaaatttttcactttttttttttttttttacaacttcaatagaaaatttcaattgaataactcatcagtcataaccacttcactttaattccacattccttttatcggttcccgtccccaaggatctgtacacgatatgtctaccaacgataagaaacagactggtcttgcccgtttgcttggatctgcctctgcaggtatgctcgagattggtgttttccacccagtggataccatctcgaagagattaatgacgaatcacaccaagattctcaacacaactgaattgaaccgtgttattttccgtgaacactaccaggtgcctctctccaaacgtgttttcacacttttcccgggtcttgggtatgcagcatgctacaaagtccttcaaagagtttacaaatacggtggtcaaccatttgtcaatgaatttttgaacaaaaactacaaggcagattttgacaatgcttttggttccaagaccggtaaggcattgagatccgctaccgcaggttctctaattggtattggtgaagttttcctattaccattggacgttttgaagatcaaaagacagacaaatccagaagcattcagaggcagaggattcttaggaattttgaaggatgaaggtcttttcaacctttacagaggttggggttggactatggcaagaaatgcccccggttcatttgccctattcggtggtaatgcttttgcaaaggaatacgtcctaggtatcaaggattattcccaagcaacctttgcccaaaattttgtctcttccatttgtggtgcatgcgcatctctggtggtttcagctccattagatgtgattaagactagaattcagaacagaagtttcgataacccagaaactggtattaccatcttgaagaacactttgaaaaacgaaggtattacagctttctttaagggtttgactccaaaattgttaactactggtccaaaattggttttctcatttgctctagcccaatcttttatccctatgtttgatagactattacagaagaactgattgaagttggtcttgtaaatatagatgtttacttgattcttatgaatagatatacggatagagtttgcagtaaaatacaaccatcgaaagctggcaagtatgggtagctgcttgactattcaccaaaatagccgcccaagtagttaatcacataagctaagcgtacgactcacgcgaaagtcatatcatatcgtacgaactggtttaccccgggaaaccttagaatggggaagcataagtttataaacagatagtattagctgtagaccattaagaacgaacccaagaatctctacagaggtttcccatgaatcaataggtttgctggataggttggtaaggatggtacaggcgaattataacttagatgaagacggtggtgaaaatcccttcgcagatcctaacctaagggaggataaccaccaagaagaagaaattgatgatattttgaccccaagtcctacaacatctcatggatttggtttgcatacgagtatacctacagatgaagacttgacagatgtaatggttggagacagacggtcttcaggatctcctaaagcggtggaatatgatggggagacgcttcaacaacaaattattcctccaggctacaatgagcacatgatggttaaagattcattcctcacaggaagggcattgttgtatttcacatcagtgtttgtatctatcggcgtgttcctgtttggatacgaccaaggtgtcatgtctggttgtttaacgggtaaatactttaaaaggcatttccacgacccatctcgagccgctattggtataatggtatcgattttagaaatcggtgccttggtgtcctctttggtaaccagcaggttaggtgaaaaactgggcagaaggcgcacgattaaatatggatcgctcgtctttatcattgggggactttttcaagcatttgcgggaggaattggttatttgattgcaggtaggctcattagtggtgtcggtgttggtctgctgagtacaattgtccccatataccaatctgaaatatctcctccgcacaatagaggtaaattggcatgtatcgaattcacaggtaacattgtaggatatgctaccagtgtttggatcgattatgcatgttcttattttgagaacaatgctgcatggaggttgccactttttattcagagtgttatcggattcatgctgttcagcggatcctttgtcatcgtagagactcctcgttggttgctgaaccacgatcgtgatgtggagggatttatagtcattgctaatttgtacagcgatggagatttgcaccatgcaaaagctaaagaagaattccaatccatcaaggaaaccgtgctcatatcacgtatgcaaggcgagggcaaatcttatgtgaaagtcttcaaaaggtatcggagaagaatgctgattgccatgagttcgcagatgtttgctcaattaaacggtattaacgtcatctcatactatgctcctttggtctttgaaaaagccggctgggttggaaggaaagcccttttaatgaccggtttcaatgggattatgtatatcgtctctacattaccgccatggattctcgtggacaaatggggacgtaaaccgatgttattgacagggagtattctcatggggttcgccctcgcatgcatttccttatcgatgttggcaaacattaaggcaacaccaaaattagtggtagtatttgtggttattttcaactcttcatttggttttagctggggtcccattccttggttatacccggtggaaattgccccactttcagcacgttctgcaatggcatctgcatcaacagccaccaactggctctgtaattggttagttggtatcatgacccccattttagaggaaaaaatcagctggggtctctattggatccacgcaacatcctgtttcgcttcctttttggcggtttacaagatttatccagaaaccgccggtgtcagactggaggacatggatacaatatttaatgacagactacccagttttggtgtgactaaaaacaacagatctaattcagatcctaacaacttagagatggatatggactctttaaccgtaaacgagaataacgctgatgcagatcctttcaaatccccggaagacgaagtcaatttcaagagtaatcaaagtatgctgtctagaacaaacgcaacagactccttaccaattgaaaccccttcaatggatgaagttctccaatttaaggaacaacaaaaaagtaaaggtctggggatggtcattagaagtggatccagaaatatgtggtacatgattaataaatttattccttccaagagttcagatagcggtacttataacactatctggaataacgatttggaaaatggatcatgatgtattattaaaaataataaaaattcgtgcacctgatgcttaatgtgctcaacacctccacaatatttcctttttttgttataattattattatagttatccttatataaaaatcgtctcatcttctatgtataacgatcattgagaaaaataagcagtataaagaaaagttcaaggtattatggaggagaaattatattataggtatctggatcatcctataacaactgtattgttggtttcaaggggcaaaactgggtgtctcgtttatgcctccctaggttctaatcgaaaagagttgttgaagattagccagtctgatttccggaagttgtccagaagcaccaaagtgtcatacggtttatactatgatgctaacgactccatggtaaatttggaacggtcatttgcatcttatttagacggatcatttacggaaactataccatacgaatacctgtttggtactaagttccaacataaagtttgggatgagcttttaaaaattaagacgggggagactactacataccgccaaattgcagaagcaattggatcaccaaaggcctacagagcggttggaactgcagtaggtgcgaacaagatagctgttattgtaccatgccatcgatgcaaaccatgcgatggatcattaggtaactttagatggggtactcaattaaaaaaccgactattacaacaataaaacaaatgattattctattacaggattcggtaacctttcaaaacaagcgacatacttatcgcctttcttcctttccacttttttaccttcttcagtggcatgagtcattatctttacacatttatcctttgattcccattctgagctcaacctttggaataatggatgctcttccaaatgttttaccatccaatcatgcaagtccttgacatctgtaatcgtgtatacgacaccaccttctctaagcacgtaggcatattcactcaataaagtgttagtaataattctagccttgtgctttctctgcttaaagtgggggtctgggaaacagaagaacatcttagacaactgacccttgtagaagaagttaggtaaaaacttcattgcattacctctgagcacattgatattttgataacctttctgttgtgcatggttattcctcaatgcaattattttgtcctccacatagttggtaacttgaactcgaatttccatacctaggatcaattgatctggaaactcaggtgagagatccaccattaggccaccaaatccacatcctatatctgctatggtgacttgactcttcatcttaccggttgtcggatcgtggaactcgggatacagtctagaccaatccatttcatctggagacactggatattctaactgatggtcagaaaatggattggagtgagctctttgacgataaaaccttttacgaggtaagtcaatcttttgttcagattcatcaatcctgacgtgcttcaactctttacgattttcttctttattgactctataggcataacgtttagaaccagggtcctgactaagtggtttagctttcatatcgatagattactgatctaagttactgtatattgtaagtgtctatagtatgcgatgagcttaaaattttcagcgatgagcttaatacgtagtgaaaataatcacttggaaacagaatcaacggataatttttataaaaaattgattgactgaatatttatttacagggcatctgtgaattatctataacaaattctattattattcttgaccatccttctcgttgttatcgtgatgagattgcagggtcaagtataaagtttgagagcctgcctctagagttttcacaagacctgcaccacttagaatgtgcaacaatccaagtaattgagattgtaaaccttgcttgtctggtaggttcttgaaatgtgacaactggttgatatcgtagacagcagtttccaccttagcccccactacgaaaagtctatcttgcgatttttccaaaagcttcaagaccttggctacagattgtggatctgtctctgggaaacatatggctgctgtaggacccttgaacaaagggagcaatggatgcgacagattttgatcacgacgttttatgggggcacatggatcaggaaatgctgagttcctcaaataaacgctgaaaaggttatttctaagcactgtaagcgaaccgccagcttttttaatctgggatctgtagtggtggtcctcatttttcattaaattgttgtaatgtacaaatagaattacaggatttgaacccattaattgcttataggaatcgattaaaaatgtctttcttgatgtaacaggtttaacgatatcacgaccatcttgtggtgatttagaagtcttgaaggcagcaggagcagccctagatgcatatgaagcaaaacttcgtgaaacaatggtttgtgaacagatacgtaggctacaaaaacctaaaccactagaaccccataattgtcgactaacaaaattcatcacgacctatttgagactcaagaaaagctcacaacagtgagaattttgaattatttcactgtttaattcagcgaataaatgttgaaatttttcatttcatcttattttccatatcgattgttccaatcattgggaacggatcacactaacaaaaccttaaagaacctttaaaaggggactcaataagcgtaagagaggttagttataaggcttacgagtatttacaatcaattctaggacctttcattatggatagacctgattctggcagtgtttctcccgggagatatgcacctcatctctccgaattttattcaattgtcaataatacgagtcccagtagttcagatggtatggttgatggtgaacgccgtggatcacattcgatggccgctcccagtatgacgtccaattttagctctatcagcgatttgagaactctagtcactaaaagggatattaagaatactgtcgatgctcttcaagggttgttagattcatcaagggcatataattcatcgttacaagaggtttcacgtaatgctagcctaatgggacattctttagagaatctagccagattgaaaggctgtagtgatgatagtgcagagaaattattgagtgcaagcggattattctatctattggccaaccatgaaaatataatgtcacaatgtttaaagggtgtacttggtgagagtctattagataaaattgatcaatttaaggtagaatctaaaaagatggaaaatgaatttaaaagtcatgcaagggaggaaagtcttaaattgaagattcaggagagacataacttgaaattggcacagcgtagaacgagaaatttagtctcatacaaagaaagtttggtaaatctacaatctcaattggatcaattggaatctctaaggcacgattattatcaggattcttacaatttggtagaatcgacgtgtgcaaaagtgctggacgccgtagcgaccgtctcaagagctcgtgtagaaatttcagaaaatgttgcacggaaaggttggtctggtggtggtcttgacgatcttttaatggacgctgaagatcctttcaacaaggaagattcaacaattaacgaaggccagagtgaaggtgaagaaactatcgaagatgataatctaaagaagggtgttgcatcaccacaattttctactgcacaaccacacaatgagatggaatctgaagctgaacatgaccatagccatgaaaatgaagatcgagatgacgatgaagatgatggtaacgttgacccagatgctgataactcattttccctaccactggctggtagttcgagaagtcgggaaccaccaatcgaaaatgacgacgaatcataacatatcatatttataacaattatatttacaaattgaattaccgaaattaccaaaatttgtaccaaggcttcttcctctcgtcatgctgttcacttgcagtttcatggcgattatcccattggcccttaatcctttcatcatgatctacatttctacgcattggtctctccttattagccatcgtctgtttagccatctgtgcaatctggaagctacgtttgcgacgcatcctacactgctcccatccaacaacagatccaagtaaaagaccaccaatagaccaattaaatgccctagatggatttttgtgatagaggaaagtaacaccccccatgacgaacatgctggtaaacccaataagacccgaatccctgaagcatggaattgaggtcaatttggcaacggaaaaatctcgccaactaacggtaccccatgcctgtttaaaattaatctgctccttggaattggctaattgtgattgagacatctcattgttgaatttcggactagtatcctcgagtagaatcttctgccctctggagtaactcgaaggtgcaggctccgatggagatgcagaaggcaaatcagttactggttcagatgccgactcatccttcttagacttccatggccaccaacccattattcctatagtactatcaatgtctttctagtatatactaatgcttaccatactcatactcatctcatctcatctcaacccagaatttttcattttttacccgcaatatcaacgcgtgcttaagacgaagtttgaaattgaaaaattaccaacggctaaacctatagaataagataattgaggtttgaaaaagagctaaagcgccgtatttgggtcatattagaggttcagtcgaaattctacggtatctaattatccccctaccgttttttcctagtttcttttccctttcgtctattatttttggttcttgggttcaaagtttaatgttgtaaacgaaactaattcattccaacaatgtacagagacaaatatcgccagaatccctcttatgacgagccattcaatctattcccaccacattctgttaattctagtcgggaggcagtcgcaccttatccgatcgaagacgcaaatgaagttataaatccaataccggtgttcacctcttcaactacaaattcacattccacaacaccaacaagaaggaaccatgatcgatacgaaatgccatttcaatatgctgaacctggtttagatcctttaatgacctcttcgcacgttagggtaccgccatcgttatcgacaccgacggattcaagtttccccagggaagtacatgttggcacaccgttaaacgaagctatggtaccgccgccaccttatgaagaatcagaagctaggatattgcaagaaaaagcgtatagggttgagtcccctccacaggaaatacaagaaccacttccagcagcaccgcaagcacaggcccaaaggcaagcgcagcgacaggcccaaccgcaagcacaaccacaaccaagatcaaaagatcgtcataaaggtgtagaacgtgaaagagatctttcggagtattcaccaaaagccattgaattttacaaagtttataaggcgaccgtggaagactctaccaacttcacccatagcattcaaatgaagtggtgcgagactctattggaatatgcatttgatgacgagtttttatcacattacaatatcaatgcagaaaagttgaaaagaacgctaaggcctgaagaaagtttaaaaaaccaaaaagttatattaggccattcgttccgcgttctaactaaactagtctctcacaagtgtggctctgctatgtatctcatggggacgctctattcacaccaaccatatttgcaaatcaaaaataaaaacattgttgatcgtaatgacaaaaaagcactcgaatactactgccgtgctgccaagaccaatcacagcgatgcatgttatcgagctggtgtatgcttcgaatatcaaagaggaacaccagctgaagaatttaccaaggaaagagctttacaaaaggcattccaatattacgaaagaggtgctgttcattgtgctaactcatcttgcatgtacaaattgggtatgttctacctttacggcttatcgggccaacaggatccattagaggcgctacagtggtttaaaagggccagcgaaggtggtaagtctacgcaggcattgtacgagctgggcaaaatatacgaattcacctctttaccacctcaagtacaatcgattttaaccaggtacaatatcaatagagatcccgctacagcactcaagtatttccacaaatgtgccatggagtacgattatccgctggcacaatggaaattggggtactgctacgagtttggtgaattacaactacctgtaattgcgaagaaatctatagcgtggtacgcaaaggcggccctcgcgcagccaaagggtaacccaatggcaatgttagcactaagcggatggtatttgacaggtgcgccagacgtgctaaaacccaacgataaagaggcattcaaatgggcttcaagagcttgcgaagcaagtgatggtaaattaagtcgagcggaatacgcattggcttgttatcatgagaatggaattggatgtcatagaaatttaacagaggcaagaatacatttcgagactgctacaagactgggtcacattaaggcaagagatagacttgaaaagggattctaagcgcttaatgagtaaccttcgaggtattgattggacaatagtcacatggattaggatcatatgaccgttattttttcacttttcttttttccgagcttttttttctttttccacgttgtcatcttttctttttgttttgtcatcggaagttacctgggaaaaaaataagaagagttccaaacttttcaatgaccttcaagtgtattaaaggacaaaggaataaggagtatttctggaggaagggcgatctgatctagactcattcagaatcatttggagtgccttcatttttcggttttcaattatcttaccgtctgaacatttctgggcttatccagcaaattttggttctcttgattatttattagcaaacttccatatcaaagaaaatggagtctattgcacgtcaatcggtcaagatgtgcccattcatgcagcgtgctggttctgcgaaaggtttgaaagctttgcataattctaatttgccagcagcagctcgtcaatgtcctattgtaggtcatgctatgaaaagaacttatgctactgctaccggcgcacccagagaagcatcagctagtaatgctaaagctgctagaaatgcaaatgaagtagttgctaatcacgcgactcaggaatccacttttgactacaacggtcttttcgaaagtgaaattgacaagaaaagagttgacaaatcttatcgttttttcaacaatatcaacagattggctaaagaatttcctaaggcccatcgtgacgtggaagaggataaggttaccgtatggtgctccaatgactatttggcattatccaaaaatcaacaagtcgttgatgctatgaaaaagactttggacaggtatggtgccggtgccggtggtaccagaaacattgctggtcataacagacacgcactaagattggaagccgaaattgcggctttgcacaagaaggagggtgcccttgtcttttcatcttgctatgtggctaacgatgcggttctctcattgttgggacaaaaggtcaaggatttggttatctttagtgatgaactaaaccacgcttctatgattatgggtatgaagcatgctcaaacaacaaaacacatcttcagacataacaactacgcccatttggaagaattattgcagatgtaccctaaatcaactcccaagttaattgcttttgaatctgtctattcaatggcaggttccgttgctgatatcgataaaatctgtagtttagctgagaaatacggtgcactaacatttttggatgaagttcacgccgttggtctctacggccctcatggtgcaggtgttgccgaacattgcgattttgaacctcatcgtgttactggtgttgagagtgtcccaggtaactctactgtaatggaccgtgttgatatgattaccggaactttaggtaaatcatttggtactgttggaggatacgtggcagcctctcagagattagttgactggttaagatcatatgccccaggctttatcttcaccacctcgttaccaccttcagtgatggcaggtgctaccgaagctattagataccaacgttctcatttggaactaagacaattacaacaattacataccggttacgtgaagcaagggatgaaggagctaggaattccagttatacccaatccttctcacatcgtgcctgttttagttggtaatcctgatctagcgaagcaagcttcggatatgttgatggataaacacaaaatttatgttcaagcaattaacttccctacagtttcaagaggtactgaaaggttacgtattactccaactcctggtcacactgacgatttgtcagagattcttttgaatgcagttgatgatgtctttaaggaattgcaattgcctcgtgttagagattgggagtctcaaggtggtattcttggtgtcggtgagcctggattcgtcgaacaatcaaatctttggactgaggaacaattaagtttgactaacgaccatttgaatccaaatgtccttgacccaatcttagatcatttggaggtatcgagtggtattaaagtttaaatttacattcagtatgagtacgagctgtaaatactcttgaaaatatgatatggtatatatatatatatatttattcactctacatgagaagagaagcaaatgaaaagatgtttttatttattttcaaacagtaagtagtagagcagaataagaggttgcagtataaatgtattatactgaattatactagcattagtatttacttgatagttataatataaagatgacaacggttccttaataccgtgcttcagtcaatgataacaaaaaaaaaaaaaaggggtggaggaggttaatttgcttagtgtttgttgaagttcaactcttgggttagagaatccttgttttgtctcaattcattttgcaattggtcgacagaaaagtcgtgattagcttcactagacaatgggttagaagatggaacctgtgggaatttgtgaccagtcttatcggaagccttgtttgcggcatcttcaacgtcatggacggagaaatcgtgaccaaagtgactgttgtattcatcgttcaaatcactcaaatggtggtgactgataccggtagagccagcggttggagtttcagttgggatgtgagatgagaaagtttgagcagtagcttgcaaggggctagaagtttgtttctgggagaaagcttcagaagggtgagcctcatgagtggcagcaccggcagtaccggcagcaccagcagcggcagaacgagaagatggaacaccacgagaagcagcggtagtagcagatggagcgtgaccactgacataagcaccttgttcttcagaaccagtaggagcagcactatgttcaaatggaaccttagcagctagaccagcagtagttgcttgtggggcagcagaggaagtagtttttggggcagcactagcacggttgtagttagcgtattgagtcttgacgaatttagagactggacccaatttgcaatccaatttttccaagtatggtctagatttttcagatgcaatctttgagaattcagcactcttagctctggcgatcttcaacgcgtggttaacagctgcgtcgatctcttcttggtgggtgtggtagactaggggtaaggtaaaggcagagataacccctaggaagacaatagtccagactgaaaaccaggagaaaaatttgtgcaagaagtaaagaaccaaacctgccttcatgttttgttttggttcgtcggcgaacaccaaagttctcaattttgcttggtaagttggcaagtgtctcaacagttcttcaatacgtggtcttagacagccaacaacgtttggacattctttcagactgtatttggagacgagaccttgaccaaggacgacctttgagacaaattcaatacccccggtagtaaagatcacagtgtataaaactctcaaaaagaaagtgatcaagttaacttttttcaaaatcaacaaagtcaataaggacagaccaaaatatttaccggtttcaattggatttttccaaagcaatagatcagttgttgggtccttaacaggaactgatggtgcggcaccaccagtggttgcgccggtagacgcgtaatctgatggagcttgaggaggttgagctctaacaccttttggatatgacgacattatactggaatgtctgtttcttaactaaatatattggttatagaccaactattcaatgatattgttgttaaaaggagttgttgcagtgtgattttgcaaagaccaccttgtatttataagtccaagggcaggaggtagcgggttttcccttttaggctagatgggaaaaacccaaacatgctcaccgatcacgtgtatgggagaagggaggaaagcaactggtacaaaggagctaagggagataagctagaagtgtcagtgcttgcctagagcgttttggaacggaccttttcatgttcgagagagggttgatattatattacgcgcgtcactttggacggcacccgatatttccactgtacgcgtataccgcattgccgccgaggaggtcctttagtggttttcctcaagcaaagtagtgctggtccacggagtttgcgctgattattaataggtacagacactattgcaggattcacagcaaaaaaaaatgaatagagaggttgttgttatgtttgaagaatttgacactagcagcaaacatcgcgttaattgtctcaggggtgcgcgatgaaaactccgaaaggtccgggcggctaaaagcattgaactgccaagaaattattatcaaggtggtttacagtcgcgtcgtaatactggtaactgtatttacaatctacagtgtggaatgggaaggaagaaacgggtggaaaagagttcgttgaagatgattgacgttttaatacatctgtatggttagtgacgacttcctggtgttgtacgcccttgactgactttcattgcagtgtggaacctgttctcagacttatggttcttgtctgtagataatgtttttcctttttctttctgtagctatggagaagaccgatgaaaactgggcgagaaaatgatagtgtacccttctcttccactgagtagctcacaagcaccggataaacatatgcatgtagcgcattcgaaagttcactcatttcaatttgaaccgcttgtcgcaatcgtgccctctggtttttgataaacttgaaggccctaatcggggccacaatcattgggtgtgctgctctccatcgcccaccaaggagattggttcacttgctaaacagaaagtagtcttttgacctggcttcgtgaatactcgagcgttgagtttttcatccttgtataacctagccttcccagagcgagacctcggggaattcctcctccgccccatagtctttgaaactgtgactcatagtacgagcggcacctttacagaggcgggagtaccgctcaccggcaaacataagcataaaacaaattacgctcaagcagacatcccccaggaataccaaggggtgtaatattcgtccaaagcttcgatgattcacggaattctgcaattgacattacgttccgtagtagcaccccaggtgtaaactttagcctcttcagcacgaatcttcacacgcctatctaccagtgtactcatttcagttccgtcaactacagtaccattcgccttctctatagctactattgggtaatatgccatactactatcaaattttgatagcgccttgcgtcacatgtaattctctcgaacctgaatagcaaattccaccggaatttggaaaaggaaaaattcaagtgaaaaaatacatcaagtaatactcatctcaacctttgtatttatttgagccggaaattctaaagctcgtttctggcactcctatgaacttttgatacctctgctaagctggccatagccttatctcttccacaaaatgctacgattcagtagactttttcacaccactcctcgaagaaatgctcagaacttgactgagaagattgttcaaaaatatgctgttggcattccttctggcaaggaagtccgtatgggtgactatgtttcaattcaacctgaacactgtatgtctcacgacaattcatggcccgtagcgttgaaattcatgggtcttggtgccaaaaagatccacaatcctcgtcaaatcgttaatacattggatcatgatatccaaaatcaagatgcgaaaaatctgaccaaatataagaacatcgaaaattttgccaaatctcaaggtgtcgatttttaccctgccggtagaggtattggtcatcaaatcatggtcgaagagggttatgccttcccgctgaccttggcggttgcctcagattctcactctaacacttacggtggtgtcggtgcgctaggtacgcctctggttcgtacagatgcagctgctgtctgggcaactggtcaaacctggtggcagattcccccagtggctcgcgtagagctacgtggatccttaccacatggtatttcaggtaaagatgtcattgtagccctatgtggtgttttcaacaacgatgaagttttgaaccatgccattgaatttgcaggtgatatctctgctctctcagtggaacaccgtctaaccattgccaacatgactaccgaatggggggccctgtcaggtcttttccccgtagacaagacccttctacaatggtataaagagaagcgtctgccaaagatgccaaatgatcatcctcgcattaacagtacgcgactaggtcttctggaacgtcaactggcgcagaatgatgcggcgctacgtcccgataacgacgcacaatatgcaaagaagcttgtactggacttaaattcattgacgcactacgtgtcaggtcctaacagtgttaaagtatcagctccggtgcaagatttggccgatgtcaaggtcaacaaggcttatttggtttcttgcaccaattcgcgtctcgcagatttagaggatgccgctgctgtggtatgccccactggtgatttgaacgatatcagaaaagtagcacctggcgttagcttttacgttgctgcagcttcatcagaggttgaagccgatgctaaggctacaggtgcctgggataaattgttgcgtgccggttgtacagttttaccaccaggttgtggtccctgtattggtctcggtacaggtctgttagaacccggcgaagttggtatcagtgcaactaaccgtaacttcaaaggtcgtatgggatcaagagaagcgttagcatatctagcatcacctgcagtcgtggcggcatctgccgtaactggtcacatagcatctccagccgaagttatcggtcaacctgatgccaaatttagtggtatcaaggcctcaactgatacacagagcgaagaggcacctgcagccgaagcagctgattccaatgcttccgcagctaccgaatctggtacagaaatcctggaaggtttccccagtaaaattagtggtgaattagtcttctgcgacgccgacaacgtcaacacagacggtatctacccaggtaaatacacctaccaggatgatgtacctcgtgagacgatggccaaggtctgtatggaaaactacgattctgcatttggagacattgccaaaccaggagatatccttgtaagtgggtacaatttcggtactggttcatcccgtgaacaagctgctaccgctttattggctaagggaattccgctagtggtaagcggatcttttggtaacattttctttagaaactccattaacaatgctctattgacactcgaaattccagaactaatctcattactacgtgaaaagtactctagcgaagcagctaagcccactagacgtacaaacatatttttaacatgggatgtagctcataagaaagttgtggtcaccgaaggttcaccagaaggtccagttatcctcgagcaacaggttggtgaactgggtaagaacctgcaagagatcattgttagtggtggtcttgaaggttgggttatgagaaaattaggtacacagtaaaacaagtagtccagaacttatttatttatttattaagagaaacgacaatctaaagatcttaataactacgaatttttatagaattacaaattaattcgaatgtgtataacgtaagaatcggttagagaggaaaaaatgaaattttttttcaactacaaatacaaatacaaatacaggaaaaaaaaaaaaaaaggaactaaatagaaggtagctttaagcatgtctaggcgtattcgtattggtggtagacaatcccagttggccattgttcaatctgaacttgtcaagcatttgattgagcagaaattccccgatattacatgctcagtatttgccctacaaacattgggtgatcaacaacagtccaaaccattgtattcatttggcggtaaagcattatggactaaggaactggaagatttactttatgatgaagatgataaccgtaaactagacattattgttcattccttgaaggatatgcctacaacattgcctgatggttttgaattgggcggtatcactgaaagagtagatccatctgattgtcttgtcatgccacaagggtctcctcacaagaatttagacaccctacctgcaggtagtgtcgtcggtacatcctcagtgagacgctcagcacaactgaagagaaaatacccacatctacgttttgaaagcattagaggcaacttgcacactagaataagaaaattagacgatcctcagaacgattatcagtgtatcatcttggcatccgcaggtatgaaaaggttaggattaggatataggattactaatacatttgacagttcggtaatgtaccacgcagtgggtcaaggtgcattgggtattgaaattcgtgcacaagataaagagatgaagaagatactggatgctgtctgtcataagaatacaactgtgtgttgtcttgcggaacgtcaattgatgagatccttggaaggtggttgctcagtacctattggtgtgggatcccgctacgatgaaacaacgggatacctgcacctacgtggtatagtcgttagtgtggatggaaaacaagcagtagaattgaaccaagaattggctataaacgatgtaatacgtgattcaatcgagtgtggtaagttgctagcggaaaaaatgatttcaaatggtgctagaaagattctagaagaaatcaatcttgataagattgaccagtaaatgtattgatagagaccatacgtgaattattcacgttgtaaatagatgataatttattttgttacccgaccgttcttaacagtggtagctgtagtagtagatgggctactagtaaagcatcgctagcactaatactaccaccacatggaagccgttctctgaaagcatttgtctgtcatggatcggtttagtagagttgtaagtgatcctgcattctcagaattaactctagaagtggcaagattccccaagagtcttgaagggtgggagagacttttaaatcatttaacgactgtagcatctccattaaataagaatatcgatacaagactctaccaattgttaatatccacttaccaatcttttctttgccagttcccctacttagagaattactatgtggattatgccctattagaatataggttgggccatttgaacaaaatgcatagaatattccaacatggattggcggtattcaataacaaatctttactgctatggacatcttacctcaagatttgcaatgaagttgtaccaaaaagcaagcaattgttagagaaatacgaattggcagaagaccatatcggtatgcatttctttgcaggtgaattttggcagatgtatttggaacaagtcaaattaagaagtaaccagcaacagaggttcttctccatactaaggaaaacattagagataccgttgtactcctttagccatttctacgcagtctggcttcgatgcgtggatgatatacaagatctatctcagttgaagaaactggcacccaaagaagatcttattaaaaaattgaagattgacatcgatacaggtggcaggaaaggtcctcgattgcaagaggccaagaaactattgaggaaattcactcgtgaattgtatttggtcatccagtaccaagttctcgagatttactcactctacgagtccaagatacagacgcgctactatgtgtctccagaaactcttatacctacccatgaactagaactttggcaaaaatatttggaatatacagtgaatttgaaaattgatgacttaacccatttaaatttccaaagagctctcttaccattggcgcactacgacatcgtttggatccaatatgcacgctggctcgtggattggaaagaggatttgttaaccgctaaacaagttttgactaagggaatctcattatcactgaaaaaaagtaaactgctcaaatttttgtacactatcttgtgcagtttaaacgaattcgaccaattacaatggatcattgaccatgttgaaactgcatactcaaaccatattgaagaaaccgatgattttgaattattttgggactatgtccatttccaactttttatcaagcctcaatcaggcgatgtattagacattatcagtagacgtttggaccattgtcaagcaagagaagggcaattcttgttgttatctgccttattacaactgcaaaaaatggataacacatcctccattgaagatagaattttccagcatttgataaaaaacaattgggattactatttaaaagacggcagattctggtcactctacagtcgactaatctatctagaccccaatagatcttatttggaaagaagaagatgcatctcaaaccaagtgtggactaaagctcgtgaacgtcctacaaaaagtgaaatattacctcatttacagcagttctgtcaatcctatttgcctgaagatattgaccacttagaagatttattccaataacaaccgacaatttacgatattattacaacaaacgtttttccttttgaaacgtccctctttttctaaataacttctatgtatatattaagtccagtaatgaagatgtagaggaccagcagtgttatactgatcttcttgtcaatacgccaaccgtttatcggtaccacaatccccaggatgatgaatgataccaaaacaccaatggcgcttagactgagatgtgaatccacttggaaatcaataccacattttatgagagatttttcacaacccttatgacttcctaacattagtataataccatcgacaccaatacctagcagaaaatacaacagcggactaccgaagcaggcgccaagagcaatgtctagtacaccaatttccataaaaacaatgtttgaaactaaatcaccgaaagaattaccccaggcaaaaactgttaggcctagaatggtattggaaatgttaaatttctctccccatttcatcaggatgtttactacgagatgcacattaaaggatgttgcactcaatgataaaacaaagcctgcgattgctcgcaagtttatattccagttgataatacctttataccatctaaaggatagaatgataaaaagaatggaacacagtaaaagcaccgacaaaggacactcttccgccagcagaagagaggaaattgccggaaccaatgaaaatctgatcacatcgagaatatggtgcggtttatcttgtttatcttgaggcatcactggaaccagtatagttaaccagatggtgagtggtgtagtaaacagtagtaatatgaattctgaagtggggacaaaggcattggcatccgttaaataaccatagagcttgaacctttgaagccaagatttaaaagttttaggagaaccttccacggcctgtgattccatgacaacaacatgttgctcgtcagattgacccaccggtgtcaacgtatagtaaagcggtcttagatcaggcaggtggtcgcaactcaaagatttagaacatacaggtctcttctgtggaaccgacaacagttgatcattttcttggggccctgaataatgcacacttccctctgatgattgagtttctggtggaggatgggatattacaggtaaatctgcagagatatcaccttcttgccaagacgaagcccttcgcctagccaccagcggcggaatggtatcttgatcaaattcactctctatatctgaacagatatcagcggcagcaacttgttggttcttcaataaagtttcgttttcccaaatgtctaaaaagtctctaagcctgattctaatccatctattataattgactcgcaaatactgacgaatccttcttctgatattagccctcctctccctaataccttcattgaacatatgaatgttcccacggcgagatatttcaggtacttcaacattacttacaatggtagtaatatcagccatcgcatctgagttttcacgttgggcagacactactggacttgaagggagcaaattatcacgtttgtggtcaaacactaagaaagttgcatacgcacagtaggccagtaccattactgcacattcccaaagcatgagggtaccatcacaaaggaaataaatcgacaacagaattagtccagcaaagatcgacatgtcttgaacgaagagttgtcgattgtaagctactgacccagattcatccacacttaagggttccgctaaactctccaagttacaactcaatctgtccattggttttaactcgattgttttgattaaagccatagaacccaataccacagttaataggaagaatataccacccaataattcaccaatggctaaagtaatggcacctgcgttcatagcttggtatgttccggtaatatcgggaatggcattacccattgccagtagggtgaatccagaaactctgtcagagacatgcaggatatccctagatatttgagatagtgatggtgttaaaaaatctgaagctattgaacccaacatcacaaagcatccaaaaagtccaatcggctctacataaaattgccaaagtctttcacttttcaaggaaagtataatgagaatagcatttatcgaatagaaaaatgcagcgacaatgcatcgttggtaaagtcgcatttccagtaatgccaaatatgatttgctgggtatattattgatatctagaattctctattggcagctatcaacacatatggcggactaaaactttcgatcttggcaaaagttctgttaattgtgtagttgggtaatttttcattactcggagtcgataagtcatctccaatgactaactacataacatgctcaagaaaatattgggataaaatgcccaggtatcatttatagtctctgatttgaaatgtatttaatcgtactgaaatcacaattctagtttatgtactcttgtctatctacgtgatctggtggtgtagcaatgtgtcgcagatggctaatggtcaacttgtttctggtatttcagatagtttggcctcgataagatttcgcttgcgattaatttatccttgttaatatcatctatgagtgcctccttggaattatagttcagctcaggtctaatacgccccagaagattgaatttaacctgagcgccgtagaaatctgcttggaaatggtgcaaaatgtgcagttccaccgtcttcaatttattgtggtagaatggattctttcccactgaaaggaccactggatgtatttttaaatcatcattagtttccttgagaagtttgccatagttataagttacagttctaccgtcatttctcaaagccgtagtatcttcacggtttacacgtttcaaaagagcgtatccaaaatatactcccaattctagatcttgtgtctctggtggcaattgttctaggggaacgttggctgtaggtattccaagttcagctgaacctctaccaaatccgaattcgatatcacagaaattggttacgatgggaaatggtgattctggttcctccggtatgagccaatcgttaggtcttagttccatcagaagttgagcgaatgatgcaatctcgagctttgttttctacttattgtagtagagaactttcgctgtttgtaatctggtaatcagataaacgagatagtactaacacacatgacatccaattctccaagattcaaaattctatttatcgtacttaaagaggtgaacgtatttaatctatcatctctgggaaactcttgattccactcgtctgccattcttccattaatatacgtagacgagcagcaccgacgtatttctgttgtgcaaccgctgacgttaagttatcaccaacgagctgtagtaatttttgagcctgtttaccatatgcctgatagaattgtaaagcagctgcatcccaccacgatcctaatactacgaaatgtgagtttgttagcaggtcttgagaagtattagcgatgcgtgctagtaatctccaagagtacgaaattggtaaaggatgctgctgttgattaatgacttccacagataacggtaaccttgtaataaccgcaaacagtgtgaccattccccccattctttcatcgtaagaagtatcctcttcccatttatcatcggaattcctcttccaccccatatttgaacgacctttttcagtatcaatcttacaggtatagccaatgacaaatggacattttttaaccaatcttgccattaacaactctttcaaatcaggatacctagtcatcagtgctagggtcagtttggccaatggtaatgcagattcaggtttaactctaacctctgtttctgactgatgaacaagagcctttgcgataaagtttagtacccataggtatgcaagttgatttgctttcgtttgatcgattaaaccgaacagctccatttgaatcgattgtaattgttgattactattagtcaattggccaaatttaggattgatctttctcttatgacgtgaaatcaaatttctagtatcaacatccatttgtttaacaggttctacaatttctttcttgatctgtaaaattttatccttataatgccaaaaagtcttttcaatccctttgaaatctgttacagtcttaccacgtcttgcctgttccgctatcaacgctttttcttgctcatccctggttcgttgctcttgttgttccttctcttcttttaatttcctttcagcttcttgacgtttcctctcttcttccaattgacgtttcttggcatcttcttcttcacgtcgtcttttggccagttcctcttggtgtttgcgtgcctcctcttcttttctcctgcggtcctcttcagccttcctcttggcatttctcactgattggacctgagcgctattatcaatgtccaattgattcatttttgacaccagagaattcgccaaggccgatagaatatctctagtatcatgagcaactaccgatccactagatgcaaatttagatgcagatgcagagggggaagcagagttttccaatgaccgttcactggcttgacctgaagaacccggtacaacggttggaatcgactctacagtcgggagctttgcacgcaagttcaattgacttagtagctgctcatattcggcatctaacttctcagaaacttcacttgactgcctgctgtgttgcctcggcagttttaatcttggtatatcaacctctttctcattgacaaatgtgtactcatcgggacttggctcatctgtagaaaacggcgaaacatcctcatcatcactaatatcatacaattcgtcaagtacgaatctcatgtcagcctaggttaacgagagtttgatgccggtttccagttctcttgatacttctaccttcatagagctgaattcaagatgaacttctaatgttcgtccataatgatatttatgctttactattgccgattgaaaaatttcaccaatactgaaccaaaaacattgataatacaccaattgtataccatattgaaggttgtttaagcgcccattgtctttgaaagttgttcatcaggtttttggcggttagatttgactatgcagaagttctcctgttccaagaggtgcttttcaagcagtagtgttgcctacaagtctcactgttcgttggttaaccctgttcatcatagagttagaattgataaatcgaggctttcaccaagatttcctgagttaaacttggataagaatgatattagaaatcctggatttaaccctgtaacaacgcaccaggaccgtgttcacgaacactatttaaatactttaaaatccgatatgcttttgattaactatgcacacaatgcacaaaccaaagcggggctcaaaaagagatcttgggatggatcatcaccataccacatcaatagaccattaaggaaacctcaaggcagtaccagtcaattacctgatttacacccagtcaaatggcataacattccagaggttaccagcgtcgttttgaactgttatgttagggaagccaaggagaacaaattgctcgccatttctgcagcattacaactacagcaaattaccggttgcaaaccacatccaattttctcaaagagcgatgtacccagttggaaactgagacgaggtaaccagatgggggccaaaattgaattgaaaggtagaccgatgtcgcagttcctatcaacattaaccgaaattgttatgcccagaataagagagtacaaaggtataagtaacaagtctggtaatggattaggttcattgtcctttggtctgacttcagaggacgtaaaattctttccagaaatcgattctaaccaagatctgtggcctaagacctttggtatgcatatcaacattaacacttccgcacagaccgatgttcaagctagaactttggttagtggattccaaatcccatttcatggtgtagaaaagaagagaattgcctaagatacttgtatatatatggtattaaccttgtatttagcttaattgaacgatattatagtatacaagccactcatatcgttgaaattcaaatattcgaataaaattatgatgacaacaccaagcttatacttgcatttccaaatattgatactatcaaatattcaatatcgttattattccttatacttatcactatagacgaatatggttttttcaatatgatcgatattgaagtgaaaagttggttgatgcactacggtcaattaaccgtccaatacagaagattatacacaatttaagccaattggagacatcctcaccatgacagtctctaaggaccgcctgttaaaagtggcagaattatcagccaaaatttttgaccaaaatttcaacccatcaggagtgagaacgggttcacaaattttggccaaaagactgaagggtcctgctgttgcaagttattacggtgatccagatctattaaggttcagacatttacgaactttgtacccaggatttaaatttgcagatttggatgaagaatacagactgacaatgttagaagctagaaagagacgtggtaaaggtgcaccaaagaagaagaaagaagctacttctggtggtggaaaggctaagaagagaaaatagattcacaaaattagcattacaaatgatgatacatttaggttcatgtacatagatatcaaacccctgtgtaaattaaaacgaaggaaaaaattattatacgttaatccaattttctatccttagtatttgtgaattgttcccatttatcatataacgtgtgaatatctataggtctctttggtaacgatgaatacaatatttggtacaatctatttcttttaatggtaaccggcaacccaagtgtgatctgctttaaagtcttgatggaataaaagttatctctaatgtgatccataagtaccacgaatggtttaaacataaaataaatgcttaggggtttattcttaagctcaaaatgcggtacatcttcattttttttcaattttaacgatataccgccagggattcttctgggatctttgatccttaataaaagtgcaaatagtgggaaatgatttaaaagtgcaatgatagattcgagaataatttcaatagtgatagctgccatccttagcacggtatatgaaaaataaaatgctaaaactgtcggcgtcaggaaaactaatatgataaagaacaaagtccccaacagcaattcatccaattggaaaaaattattatccactctattacgcaaaatattcttctttttcccacaaaataaataaaataagcttatcataatgttcaattgccaatggtatattttactgctgatacggtagaagagataaatgtgaattgataggatggaaaaataatcaagaatcatggagagggcaaacgttccgccgaatacacagctcatcttagccaatccattgatgaaaaatttcaaagtgccaacatccgccaacggttttatgaacattaaattggaaaaatcgattgtccataggaacatatcacttaagaaaagcgccaattcttcattgagtttaattccaacggggttttgagccaaaacaagcgttacagtattaatgcaatgataaagacagtatgtgatcactctatgaaggacaggagcgatttcatcacatttctccaatagaatagatccaaatatcagaccaaatgaaacatcgttcagcattaaccacaaagtgttgtagaatctgatgtaatcaggataatattttgaaggcaaatccttacgcagattggcagacgcctctgaatatgttctaaatcttggtagtgccttacgtatggaaacattcacattaattcgcaggtattgtaccggaaaataacatatctgttgacatctcaaatctatttgtcgtgcagtaactgataggttaaccagcggtaataaaccattattcaatatcaagtagatgcaagttgccagatggcaggcaaatatcgtcacataaaaacagatactagctaaaaaatttcgtacaggtttgagcctgttccatagggcaattcttctattataggtcttgacagatttccttgaataatgtgggtacctatgatataatgccgctaaatgcgtactgaataaatttaacaattttaaagattgccttagccttctatcatgagcttggtatcgtggatggtcccaaatttgacatagacttctagcttctttacaactatcattggcatcgtattccttttctggtaaactcaaagatataggttccaaactaaagaattgtaataattcaattctgggtgctctaaactctataatacaagtctgcttaatagaaaattcccactgattactgtaagcttttctcttgcccacaatagcatagggtgattccaattccttgtcgtcgatcaattggttgggaactgcgtcaagtactacataatccgtacctcttaatgcaattgctatagctgctaactcttcactgggaagacgaagacttctagaattcaattcttgaggccagaaaatgtatctattgagattcatagcatttatgcttggaattctatcctttattatttagtttcttaaacatgcactactaaaataagattcgcgaggtttgaagagtcttcaccttcatcgaataatacagttattttgatagacgaaggttgtgaattcttaagctggaagctcagttgcattggaaaactgtaatctaccagtatttattttggtttaccatggtaaataccaagagaagattaactcagttgtttgagcctgggaataatgatgaagatgatcaaggagacacatctggcggccatgacactaacataccacttgtcaaaccatcagtgaatgtggtaccacctcaaactgacgatgaagataattacgaagctgataatgatgagaatgagataggattaagtgataaagaggacaatgagacgcccaagaaagagtcaactctcgggaatatgtttaagaaccagagtacttcaaagcttggtaaagcacgtcctaagcttacactacgtacaggatcattcaataatgattctaacaagaatgtgggccattccaagtctttttcaagcttgtctggagaccttttcaaaggcaaaggtagaaggcgaagtaatagtagtaatccccaagatcagggcacttcaccagattctaatacttattcagatcgtccacctaaatctgctaggatcttatcctatattgcagcagaagatatggatgaatttcacgatattgagaaggattttcaaagtgcaatggacactgatgggttatcatggctaccacagttgggtcagatgaggagtaagagtagcgctaatttattggtagataatggtccagatagcggtaaatctcagggttatattgaggatgctgatcatttaggagataaatttggtgagagtgagtcgttacaacctgatgttggacacagtaatgcaccagagcatggaaaaagtagtatattggggctagcactgcattcgccatcacgaaaggatgatgctggctcatttttcgataaaagcagtcatgtggaggtttcttcattcgaagtggaggttgcaaatttcgatgaagaacaggaagaaggctcttggcagttatatgggaattcactggggttaatttctccgacaaatcctgttcgtctaaaactggcggctttacaaatgagtgaaaaatatagattttttatggtggttatgctatctcttttcacttgtcttatggcttacagaacttacgaacctcattccaatattctgttcagtttttcaaattgggcagatgtaataaactttttactatgtgtcctattcactctctccgatgtttcaaagataattgcgtttggtttttgggatgattctgaaatgtttgccgcctacggtaagaaatacgtatcgcttttggaaaagttcggtgttataaaactttacctatatttgagaaataaatatgggcctcaaattattaatacaataatcccattcagaatagcaacagatgaagaagagggaaaatttcaacgtaagtcgctgggcgattcgtggtctgaagaggagattaagaggagatcaaagagaaagaattttgaagttccaagagcatttgcacgttcatcatggaataggattgatttgacttcgaccatttgtttttggatagcacttttcctgactattaatgattacgatagaaagaatggtatcaggatttttaagactttggcaattttaagaatattaaggttggttaatacagacactggtctctcatctattttaagagggatcaagcaggcggttcctcaattgattaatgtcggtactatgctcgtttacttttgggttcttttcggtgtcttaggtgttcaaagtttccgcggttcctttagacgccaatgcgtttggacgaaccccaatgaccctactgatacgtacacctatgacaaccaattctgcggaggttatttggatccaaaaaccggtgcacctaaaaattacgtattcgcagatggatcagaaggtcctatatccaaaggctttctgtgtcctagaaattctaaatgtgtgtcagatacgaatccttacaacgggagagtcagtttcgataatatagtgaatgcgatggaactcgtatttgtcatcatgagtgcaaatactttcaccgatttgatgtactacactatggacagtgatgaaatggctgcaagtttgttcttcatcatagccatatttgtgttaacaatctggatgatgaacttgcttattgcagtccttgtttcttcctttcaattagcaaatgaaagatttaagaaaaagaaattagatttgaatactgttgaaagttggcccttgagaattactaaaggttattggagatattttcaagtcaaggctagaaacaaaaaatttccagcttgggcaagaaagggcttgttttttttcaataaaatcaatccaatattcgttgcattaatcgttgtagatgcaattctaagatgtcttttagatgcgaaagtttctgagagctttacacaaacttttttcaaaatcgatgttagtatatgctcagttttatttgtggaatcaattttcagactaattttccatttgcccaatatatggaaattcttgaccgaatttagttacgtttatgatctggtgatttctcttttaactttaatcattagctctttgaaagtccaaggttatctaggtcattcctattattggctgtcaatattacacattagcaggctataccgtgtaatatttttctttggattcacttccaatttatggagacgtgtcctgggtaatggtattatgatttggaatctttctgcattttattttttcttcacctttttggtttccattattatgtccgttttctttgaaggtgtattaccagatagtgaagaagataaccaaagttttggaatgtactctttacctaattcctttttatcactattcattattggctctactgaaaactggactgatattctctatgaattacagagtcatgcattcaatatgtcttcttcattcctgagttcagttttactaatcgtttggtttattctatccaactctgttatattgaatattttcattgccttgatctcagaaaccatggaagtgaaagaagaagagaaaagaccactgcaaatcaaacactatttgaaatatgtttatcctcaaaagattaaagattatactcatgccacattattgagaagggtcaggaagaaattctttggcaaccgaacaaatgaggattcaaaagactttaaacagtttctcattagaggtacagctatcatgaatattgcccaaaatatgggtgatttggcaaacgagtttcgcaaagatcaaaacccaggtggattacccaattggttagccgctgggttaggcaaagtgacagaagggttttctttcatgcaaaagttgaagatgtatactgacaatccgttctacaaaaatcctaaagttatcttcaatgaaggggatgacagaacccgcaagacatttagcttggagctcgatgaatacgaagatgaaaaacttgaatatttgaaaatgcatccatcattcaattatagctatttcatattaccgcctcgacacaagttcaggagattttgccaacgtcttgtaccaccaagtgttggtagaagaactgatggcgtccagttttatgacgatggcacagatgagtatggtcaaaaattttactttcgccatattgaaagggacatttttgtcctattcctatcgataataacactcctactgatagtcttttcatgttatgttacccctctgcgtagaatgcaggaaaacatgggtgtctggggctggtcaacttatattgacgtggggttcgtttgtatcctttcgctcgagtttctagtaaaaactgtggcagatggtgtattatacacaccaaatgcatatttgagaaatccgtggaatatcattgattttattgtactagtatcaatgtggattaatttcattgcattcgtgaaaaataatggtgatttatcaagaattttcagaggactaaccgctctcagagctttaaggtgtttgacgatcagtaacatggctagacaaacatttaacatggtggtatttgatggtataaggaaaatctttgaagctactttcgtctcattaacgctgttattcccctttgcaatatggggtatgaacatcttccgtggtagattgggtacctgtactgacaacaacatgggtagggatgattgttacaatgaatttactaacagtgtttttcaatgggatgtaatgatgcccagagtttaccagcaaccttacctgtatctcgattctttcggaagtgcgcttagatccatgtatgaaattgtgtctctagaaggttgggtggatttattagaaaatttgatgaacagcactggtgtcggtacagtgacatccacttttgcctcaccaggtaatgcggtttttttggtgctattcaattttttgagcatggttttcattttaaatttattcgtttcatttatcataaacaatcatgcaaagactacaggaagcgcttattatactctcgaggagaaatcttggttggaatctcaaaaattattatctcaagctaaaccaaaagtaactccctctctaattgagcttcctaggagcagacagtttttctatatgctggcgatagaaaaaggaaatttctattatgcatctttccttcaattgaccctatatcttcacattatcgttttattatgccgctcttacaaggaaccacacgccacaacaacttttgaagatacctactttatggtttccgccaccatatttttcatgcaagagattttccatctttacggtgaagggttccgtctgtacattaggtccaagtggaatgttctacgttttggaattgttgtcacatcatttgttttaaccgccattggtttgaaactctctagtgatcaaatttggtttagtaacattaaagaattattccatctggtaatgttcctacttattattccgcaaaatgacaccctttcagagctggctgaaacggcagttgcaagctggcctccaattttatcattaacatacacatgggcaatcttgtttttggtctatgccattgccctgaatcaaatattcggtaccacaagattgggtgcgaacacaacggataatattaatttcagaactgtgattaaatctttgattgtcttgttcagatgtagtttcggtgaaggttggaattatattatggacgatctgacagtatcagaaccatactgttcttctacaaaagaagggagtttcgccagtgattgtggttccagaacttatgcatatattttactaatgtcgtggaacattgtgtcgatgtacatttttttgaacatgttcatttctctaatcattggtaatttcagttatgtttacagacgcggaggttctaattcagcaatcgatagaagggaagttttgaaatatagtgacgcttgggctaaatacgattccgatggtactggatacttggaattctcacatttaccaagactgatgcattcctttaatggtccactttcgttcaaaatttgggaaggtcgacatacagttccaaatcttgtcaagaattacatgacagttaaccctgaagatccctacgatgtgaaaatcgattttccaggattaaataaagaacttaacagtattgattggactgaagtcgctcatagaagattgcagtacagaagatttgttcatgaggttctctataccaattcatattggggagccattagattttccagcttattacaattgatcccactttacacaacttataatccaagagaatgtttgggtattgatgaatatgttcgttatctgtacaatatgggtaaagtggataaaattttggataccgaaagaaatttggatattctaaatatggtggttaccagttggaaatattgcgtaaaaagtaagaaaagattacctaaagtcgaagacgatattagcagacagaccattgaagtacccactaacccatttactgatgaattcgagagtgattctggtgatgtaaactttgccaatacaccttcgatggattttggtgtggataatttcatgtggtccccaaggaaacggtgaatataaaattatagatatctattttcatatatacggaataaatgatgtttcatttaaaattcaggtaaaagtatgaacaactattatacttcaggaaaatttaataaccgctcaacacaaacctatagataataaaaaatggatttatcattctttatagcagaccagtaaatatgggaagagctacatcttatgactttatgactttctataattttatctagcatttgcatttgcttttgttagctcttttctaatggccaaaacactatcaacgatcacagcatctacaccagcgtccatttcaatgttggcattctctggatcattattttccacaccataggtaacacagaccaagccactgctcttaacaacttgtgccaatctgggtgcctgaataataggagccgcagcagccacaatacctaacaaattccagcttctagcaaatctaactgcattttgtaaagaagaagcccttacatctgccatttgtgcagtacccgcttcggttagaaacagaataggtatcgatggttgctttagagaaagcaacacacaaacatcaggatggaatgaagaaaacataatatcacgaccattagcgttatcataaaccacttgtaaaacggtatccacccagtgattcatttctacagcgatttgtccaatatcttcctgctcagcttcatcggccatcgggtatttgcattcaatgttaaagcctacattttgaggaatctttttaaacaattctttcaaagtgacgaatgaagatgcgatcgaatgacctctaaaattacctttgaaattgtcctttttataggtcctcgtaagcctcatacggttttctaacagtttcgacacatcttcatgagcaccaccctttgcattagtatcatcaaatcgggtcttatgaacacccgattccaaatcatccactgaccggcgtctatcctttcgattaactacgtccatatgaccatcgacgttattcaaatctagaaattgctccaatgtcaattcatgcataggaacgtcaacacccgtttctgccactaggaaatcgtgataaaccactggaatattatccttagtcaattgaacatcgaattccacataagaagcacctagagatgctgcagcaatgaatgattccactgtattttcacccaattgtaaagatttcttagaattaaaatttttaccaagaccacgatgtcctataactctggttgaaaccaaagatttccagtaagtttcagtacgtcccaaagacatttttggatgattaaatgcagtaaccatgaaatgttcaaaggacacagttcccagaacatccatagtttcgttagccacaatggggactgtaatcaaatcgttcaatgagcgacggttaattccaacaaatgcacccgtctttgacaacagggccaccgcacggccaagaaccctaggagaaccgttattacgaaaagtgttgttgctagaggacaaagatgcttctgaacccaacataccagggtttctataataagaatgggtgttaaaatcaccatggtaagaaaatgggctctctgaagaccttggtggtaacgaaccataagtgggaacaatatcaaaaaacaccacatgtgaatggtcagatttggaaggaactttaaaagtaatagcatccaaattgtcatccaacggtagatctaatacatgtggtgttttagacaaatcatcagcacaactaattaccaaggacaatgccgtatctaattgagtagatgaaactttcgaaactggaactttgttcaacgatattgctggttttgtattgcgagaatcgttaccacctaatgtaatcatcaaaagagattcatcgctattcaaatatctgtggccaaatgatttaaccggctgtaaaacaccgttatttgaatgtgatttatgatgaccaccaggagttgatgactttaacaatgctctatggttaatctttgtgttcgaactctttggtttatgttcaatagagctttgattatccgatttaccataaacactaccattactaccgttaacgattccattagagttactgtgaatagtactagtatcactttgagttgctagagatgtagttgaatctggtgatggcgattgcagattaccattatttccattggtagcagattccatatcatcggatggcatctttgggtgacaaatttctggatgatcagtaattttcaacattttagtaatatttaaatgaccacgcagagcggcatgttccattggagtccaaccactatcatcaaaaaccacatattcagcaccatggtctctcaatagttgaacgattctttcataaccttctgtagcagcaacaaagatcggggtccaaccaaacaatttttcacgtaactccgtattagcaccatgtttcaatagacaagctgcagcatcatacaaattcaatttacttgccaaataaagaggagtttcgtgagactcttcatcacagaaattcaaatcaaacccctcggcagataacaatgattccaccagagaaccactattcaatctagtagctaaatgaagtaaatgaggacaagtcaccacttgattactgttgacatatgataataaagttctcactgtttgaggatgagatccaatgactgccaaatgtaatggggttaaagattcactgtctccccaataggaagtatcatcgatggaaacgtctggattccatgcgccccagttagccagattttctataataattctggtaatctcaacaagaccatattgagcagaataatgcaaaggtgttcttttgtaattatctttttgtaacaaacatggtcttaaatgagcaggcaatttttctagaatatgaattaaagatgcaggcgaatcatttgaattaataccgtctggaccaaatgcaccaatcaatttcgaattatgatcaggtaattcagccgcctctagatccaaagtttcctttaaaagcgaattcaaattattgatttcatccagattctcctcattttccacactactatcatgggatctgtttaaatgagtattaacggtagcaaaagtaggtgaaccagcgccctttgctgtagattcactcaactttttatgattctttcctaatgcaattacatggtgatggaaaaaattcctggcgttcatatcagttgggtctctcaacgtagggataatcttcagcagttcatccatacattgaaacgattgtgataatgcggacttattcaataagttaaccaagattctagttggaattaaaaccaatgatctataaatggctgtcagttcgttaatcagtccaataccgtcgtttttctcaatgagcaaagaaatcacatcattcggtagaccgccgttttttgattccacaccactaatttcctcctcagataatttggtaccattagacaccttatcttggaccttataagaaactttatccaagaaatcgttaatagcatttaaactttttgaaattccagaatcattagaaaaatctaacggtaaaattcttgcctgtagataagcgtgctgttggtgtgtaccaacttttttgtctaattttttcaaaattttagtgaaagctcttttattcaattcaccataccatttcaaattacggaaatgtgatcttaattccaccagtatccctagaacttccactaaatcttcagaaatatcttcaggagtatgggaaactgatggcatcataggttgagaggtatttgaataattaggatttaacccattgattttcggctgtggatgttgcaaatcccttggtactaaagatataccagattgtatcattaaggaattattgatatcagcaaactgagcactagacgtcagttttctcagccttctttcatattcagaaaattgcatattgtaaaaattatccactttttcaatatctctgtcgagggcaaagaagaaaaatgctaacaactttttcacttcctcattatccatatagttctgttctactttggaggaatctcttactttagtaggtggctgattgttatccttgagatttgcatgttcctccctataaagcttctcttgctgctctgtgatctctttaatcagtttttttaggcctttgtaattcacatactgatgagaccatgatggtacctggtgattgggaaatgtctttccaaatttcatagttattagttattccttctttctcttttcttgtcttattcttttttaccctactcagattgcaccgattggaggagggtcaagtataagcttaagcttaggtgtaattttagagatctaggacagtgccaagtcttatccctttcaaatcactgtcggttcctttttcccagcaaaatgtacggtgttcttgatcaagtgctcttacaagctccttgtggcttctcttattaagaaaaagaataaaaaaagaacaagaacacgacaacgatttcacattattttgtgtacgataaatacaagaaaattggccattttccagcccaaattaatgtcttagatttaatttccaggtcgattttatcccccttccacccatgtggtttttcctcaatatgtggtgataatttccctgcttatatatcccacgttctagtaggcacagttcagtccccactataaccagctagcattcgtccgcgaatactaggactagtaattgggactcagtagatcagcctttaccaagtccttcatgtttcttgctgataggctcattacttggcgaagttctaaacctatccagacctttagcatggacatcgtacttgcatcatgcagtaagttagatgtttccttttggcgtccaaattctcttaagatgggtaaggagctggtaggttatggttagtattataatctagtggaatccgtaaatgaaaaaaaatgatacgaaccttgcaaataagtccaactcgggatctaactgtcttcctattccttctagtagtagtattgctacaacaacactcacgaaatcgccttccattcttacatgatgggatcttaccatggtgagcatttgatctagtagatcacctatagagacggtccccagtgtaaatgtcctctttttcaccttggtaaccaatttttctactttgaatgcaaacaattctttatcaactgcagtttccggtgttcttgatctttcaatcattagctcaccagcttggtatccatcgaatcttgccaatgcattgaacagtgcaatgaagttgatacggttttgcttattgagttccgtgatgagtcctgcatctataaagcatatctgtggtgtgtattcttggagtgcatatttcagttctttaaccaattcatctgaattattttcatgtgccaattgacgtagtttatgaacaatgctaaaatgctctctttcagttgaagtgacatgcgtaccatacttgtcagttttgagaaatcttatcataacgttaccagggtgtaaatctgcatggataaaatcatccaagattagcatctgtaggaatgcgtctatgaatagatcactgacttttttgcacaattctgtgcttctcaatttatccttaacttgtaaaaaggtctccatggggaatccatggatatactcttcgaataaaacctctctactagaaaattgtgggaatcctcgaggaaatttagtctgtaatgaattttcgaaatttttattaaatcgtgttaaatttaatgattcgatccttaaatccaattgcaacctcatcaagatggaaaattgttctacttccgcaggcaatgataaccacaccattgtaggtagttcgtcgataacattggcaataaattgcataatcttcagatctctattaatctttttgccgcagttggggtgaataactttcactgcaacccacccatcgctgtcatttccatcaaaatcagtattttgattctgcatacttctgataaatttatctgatagtttacccatgtaaacttgtgcaatggccccgacacctagtggtttctctctaaattcatcaaaaatttcgtcaaattcgaactgattatctaaactttgacagatcctttgcttactgtatttcaaagaatgtggtttagaattactgtgtaaattggatagttcatgacaaagacctggtgaaaacatatcagtacgggatcctgcccattgtcccaatttgataaaactgggacccgctagttctaaagcctttctcaataaacgataccatatcagtgaaccgcttgtctccaaaatatgaacttcatcacgatccagtttgtgacgtctaccaaagaaagttattgggtaacatattagaactggcgcaaagatcgcgaatatttcgataaaccttaacatggtatatatcggttccaccaaatgatccttaacctcaaaccataatctttttaattgacgaattatcgagttacttgaagttcgtaaacgatttgatcttttttgaataacctcctgtctcaattcatgttgtgatgccaaatacaatcccatttcaaaagtatctccaccaggaaggggctttagggattcattccataacttgtaataacatgtttgcttttgagaatagaaaagagcaatacttgtcggtatcactagattacgaattgcaggtgttcttagaaaggtccaagatctgtttagaattctaaacatggcttgagaccacagtttattgataaatctcctggtattttatggaagtaagtacgtatgctcaaggctgtcatttcgacataaatttaattcttcgcgggctaatacatacataaatacatacaaaggattaaaaaagaataaaaaaaaaaaaaaaaaaatacaaaattgaagagatgatacaagattccgtgaattttgtttgcgacttttatatctttgcatttaccattagttactcacaattgttattattattattatgatggtgatgatgatgatgatgatgatgaattttatttttttttttttttttgatttttggccaaatctctaatatatataacgatttcccttataactgttcctctttaacgacgtcgatgagccaatctagaccttcagtgataccttcacccttcacagcacttgacgctacaattgaccaactcctatctttaagttcgactaaattcaattctttggaaacttcgctagctgttagggcaccaggttgatcttgtttattggcaaatactaataatgctgaatcttgtaattcttcttcttgtaacattagatgtagttccttggcagctgttgccatacgatctttatctgttgaatctaccacgaatattaccgctgctgtatctgcataataacaacgccaataaggtcgaatacttgtttgtccacctaaatcccaaacgtttagttttaaatttttatagctcaaagtttcaacattgaaaccaattgtaggctttgtcgtaacaacttcaccaatctgcaacctgtacagtatagttgtcttaccagcaccatccaaacctaaaatcaaaatacgtaattccttgttgacaccccagagcctgtcaaacatagaggagaaaaagttacccattgtataacgattgatgtgtgaggagattcgatcaggatctaaggaacaaaaatagtataatgtacaatgaattaatcaatcagaatttgatattccagttccttgatggattcaggaaaaagggaaaaagaataaaactctttctatcaatagagcgcctttccaatggctcaaaaatgtcagaactagtcagccagtgccttgtagtggggggttcttggaatctgaattgaattgaattgaactaatgttttccgttaataacgcttacaatgtttgtattatttcgtgatttcgcctcgcagcacttccagaagcttatcactttctacgctccaagtagggtaacactaatgatcgtgaaaggtgagcgattagatatactgtgagttacagttacagttacattagctaaagttactgctgggatatcgggatatacagggccattttgccgatatttccagagacgcttctttattatggaatgcggaagaaaaagggtggaatagatcactatatacgtaagatcgaattaccgatacatcaatagtcgtatatgggtacattacaactcatgtcatgtgcaggttcgtagaacattgttcattttatctaccatggccttagttctagcaacttcttataaaagagcagctctggtatgtaacgcaaatcatatcccatgatattacactgtcgacattagctgaagttcaaatgctcagatcatgtgatattcacatgacctcatcttatacggtatcacgtgatttgaacaaggcaatagtaatggtaacttgacatctcgttgcactcaaaacatgccatcttccctagcgagctctatcaccaagttcctagctaccctctctttcttctctgcatttctctgagcatttttctttgttcagttatctcttttctttattaacttcgggtaacagagtaggtttatttagaatagctgagaaaagtttatataataaggaaaggcataccaatattacgcacggacaattcgatagagaaacaatactaaagagcgagaaccataaagactaatttaaactataaccattccattccattccaatattacctgcatttagcatattagaaatactgttgtaatacatataaaataaagaaaaaaaaaaaagaaaatcaataatggtcgttttaactagaaaattactgcgagattggaaatccttaaaccgtcactattcccattttagcgcaagggaaaatgctttattttgcatcagacctcaagattctaatttacacatctggcacttggtaatttttaatccagtaacaaaagtggaagtatacctaaagctttatattggtgatgaggatgaaccaagtatcatattgaaatgtttaactcctaatacacttttccccatcggtagaagtgtatcattaacacatctaaactattttcttgtggaagacggatttttaccactattacaacaaatttggagacttttctttgataattgcgaacagatggggaattcaagattaacgtttgcttggaatagaattatgtgcaaggaattcaaaattcacttcccggaactattaggaaatttagtgtctggtgattattcaatggttaaaaactactacaatgcatctggtgtcgcaaatccaaacgatgtaatggacgacacccaaccggttttaacaactcccatacaatgccattcttcaaatggtgatactacaaatacaattgcatgtgatgatttccctagatctcaaaagagacagcgttctactggagaatctgtagatttcattacaccgggttcggatgatgatgacggaacccccctcagaaagaggttgagaaggtagcaatatattatatggctcaactcttcagcgggctggttgggggtatattccgtcattcatcatgataatataatatgatatataggaagtaaaaaaaaacaaaacaaaaggaataatgcatgacttatgtaactctttaattgatatctcatttcattcttatttattattattaataatattattattgactgtgactagctatagtcttcagcatctcattaccaactttattagctttggggaacataggctcaaagaatttttgaacttgttcaaattgtttacggtacaattcaaaatttgcaaatcctacaatagaagaccattcacgagcggataccacaaattccagatcatctctacggaatgattcacaattgatggcggcatcgatcgtcttttcaaatagctcaggtgttaggaaaaggtactcagaaactcccaaaaatactctaaacagtggtgtcgagcatatcatgtggtcgtaagggtttatacctagttgataccatgaatctactattgccaacagcgaaagatgtgagtttggtattggttcaccttgtgcattatctagagaacctgaaaatgaaaatttatccagtagtttatcatcaagcaatagaagacctttatgagatccaaatacaaactctttggctttttgtaatctttctaccagttttgccttatcgtgtgcgagcattattgtgaataactcagtggcacttgtagcatattgtaatatttgttgatgtgctgctgggttagtaatggctaaaccagcatacacatgccacttattcgaataaatccttaatgaaatgttaactttaacgttttccaaacctccgtaccacttctccagtcccatattccatggataaactttcaactttgcccaagcggcccccatactcagaaatgctgcatgagtgactgcctgagtatcagcagtaatcttatcatgctcttcgtaatccaaatacacaaatttactcttgaggcacgacattacagtctgtacaaattggaatgattcttcatgttgacatctgtgcttgatcagaactagcggttgaccttcagtgctaactttaggaccatgtaaggagtggactgtaataatttcagtatctaatggtaaatgtctttcaaatgccgcaatttcaggatttttacaactagtttgaccaccaactatggcaccaactttggatgatggcccatacaatgaaactatcttttcaatactttctgcttcgacactgtagatgataaaatcactgactcttgatactaagtggccattagcaacaatctcaaatggtaggtctgcatgcaacgttttcaatgcttgataatgttcctctttatcacaagcgacaactttccaacctgctttggagaactctttggcatagagtaatcccatatcaccaagaccaatgatcccgatggtcttgctagacttccattgcttgatctgatcttcagataccattgttgggctatatgtgtaccttctcctagaagttactgttaattgattaaggcgacaagttttctcttaaaccaatccctcatttaaaccagatatagacaaacattccaaggaacaagcaatgactagcatgattgctgaagcgctgacaattgaatcttttgcaccttatggctcgataatttcgccagatgaagagatcagtaagcttgatgaatctgccaagaatgctaaccaggggacagccatcaaactactcaagagaagcaaagtggaaaatccgttaactcaacaggtccctaactggaacctatttcgctgtttttctcagccacatctgaagatttcactacatgctaaggactctacgaaggctgctacaataaatcattcaattcgtgtgctggaaaagcatccttacagttcgcaaacgttcttaccaatgggttgctcgagtcaagagtttggatacttggtagtggtggcactggagaaccctgagactaaaaaacctgatatatctactgccagagccttcctttgtaagggaaaccaagcagtcacctatggcgctggtgtatggcatgctcccatgattgtcgtaggagcaagagaatatatagacttcggagtactgatttatgaactattagatcctaatgcccctgagaaggactgtatggagtgcttctatggtgcatctgatctacttgtcactatgtatactagctgaggtcgcgatgggcttaatagtgaaaaaaaaaagataagctcttaatacaatgcactacaacacaagatactcatcgcatgctttggggaaggctaattcgaatggctatgagtgattccgaagttgttggcagtatggaggctgttcctgttcctgctcctgtaactacaggtcctgcaactagtacaatctcggtagatgggattaccggtgaagttactgtacgtaaggctagtggtaaagtcaaagtacgcaagggtcagtctaaggaagaatatgaaaatcagttgcatgactatttccagttgaatggaggtcccagaaaaactgaagagaaatggatggatgaagtagaccctctgcgattgttgcaggaaaaggatttaaccattaaactaaacagacaatcattgagtaatttctgcgagaggctgtactatcaaagacgttatgatgagtgcctgacattaggtgaagaacttctacgacgctaccaagaggtgaataagaagaataagatgcaaagagagatcgaagaattagaatacatggtaaaacgttctaagggtaaatagtatacaataaaaatatataaatttgtttctttcatgggtatattcgaatttccacaccgctgatagtcctttttcgcaattcagtatccacgtctggtggatcgtcatcatcgtcgttggacaattcgtccattacatctacactcttggtcagaatttcgactctcttctgtaactggtcttgaaaatggcacgcaagacttaatgccttttccacagctttacccattcccagcactataacatatgtggaaccggttctattaacattggctaaaaacttgttaattctcttgagtgcactgacataaggtgtctttgatttaagatatagagttgaatgaacttgcttatgagaaatagatttaactgtaggatgcttcttgatcagtttagccatcctcacctcaatgttctgctggatagatagatgagtacttgtgttagtttaaaggtccgaaaagttaacctacactataagacagtgcatcaacccaaaagtgatatggctaaagaagcatcggattattattgtcgtgcacatttcatctaccaccacggtcagaaaccttctttgactttggtgacgccagctaccatgtcgagcgtcctgcatagaatatatccactactactcatagcagatgcaactctgagcaatctcatgtggatatgtgaggatttatgccttccctttattcatttagtaatggttctaatggtggtgaactttttatgtgaagatttacaagtagacattagtcacattgcccaattatggttaggtttaatgagtcttttctttctagcgttctcagtggcttattatatattgacactttatcaagacttgctttacgaatcagaacctccaacagtagacgacattgtaattgtgttggaatctgtagtggataaactagaaaccatacaacatgaagggttgagtgtgaataagaggcgagcattgcaattagcagtattgttaacaccactgcattggggtttaatcaaattagtgtcgatgaagaactattgtatggggtttactttaatgtgtattctgtaccattcaaattggttccaatgtactttaaaactgttttggagaattctgttgacacgaaaggtttattatggactggagaggctctttaatggtcacggtccattccccaagaaaccagtggatttttttagggccattagtagtagtgaatacatctatcgaatggccttacctcatgatgtaaaagctcttcatagccataagttacaattaagattacagcaattatttccctgggataaaccgctacacaatgatgaaaatggctctgatttgatggtaattgagtttaaaatcaatgaaaaccaaaggaaatggcaagcagacggctggaccgcccgcatgttaccttatgagagaactaaatattccattgaacttggtgggaagataaacacatgccattccccatggcagtttcaagaatctgatcttaaaaattggtcatggcttgacgattgctggagacctacagattggatttattctgatactaattgggatttcaaaggtgtgcacgattcattagactgctgcactagaacaagagcctggaaacgcagagtctaccgcctgatggaataataactagctagtatcttatatgttacgtatttatttgaatgaagttacgaatttgcagaactacgattaatcaagttctactaacgttaaaaattcagaaaaaaatggaagaataatcctttaagctgttggtggctttttaaaattgacactagcgccctattgcaatacttcttggtctttttctatttccttattactctagattttgaatctctgacatttcatgtccggtaacaccggtttgatccggacagattttctccggctcttcaaaagacaattgctcgaactaacggtccaatcaacgaactcatctcactaccctgtacctctaagggttcttatatgaagtacatctaaggtgttcgttagccatgcggtgtgtcgaatccattgccatgcaaggaataatgtttagccaggtgagccggcggttccttagtgtctcccctcgtctcaacatgactttcgagggtaataaagagggactagcaggtactgcagaagaaagaatgtcacatatctttggtgctggtagattaagaggtgaaccaccaaagtcatcaagtagaagaataagaggtgaaagcagattgattgcgggtgttcaagtgccatcaaggcccgttgaacctgataattgttgcatgtcaggttgtataaactgcgtttgggagctgtttaacgatgatataagagagtggagacgcaggaggaaagaagcagctcagagaattaaggacactgaggatatttggccaagagattggagtccacccttaccgtatttaagtttaaagaatgtacctgagtccctgaagactgaaaagattcatatggatagacagcgaaagaaccaaaaacaaaagaatattagcactgcaagtcttttccctcaaagagaagggcctttgccaaaaactgttcaagaggccaagagaagaaacttacaggagagggaaaaagagccagaaaaacaagaggctacagatacttcgaagggaagtagcagtgaagaacctatttatgacgatgatgatggttggcaaaatgttccagtttacattagagcttttgcggaatttgaaagaaccaaaaagcttcaaaggttgcaggcacaagaacagaaccaaacttagtcagacccatattatattatcgtctctcagatgagcccggttaactaatattcaattggatagtaacgttgtagagaatttatgtacggtataacctctgtcattcggataaagcaatgagaacctctacgatattagtgatatatgcaataacaataataataaaataaaagacacttgtaaaatataaaaatgtgtatatatatatattaacatacaaaaaggattgatcaaaaatcaatctagattaacatcaccttcagcatccttcttagaagattctttgttttcagcttcactctttctttgagcgcttaatttttcagatagttcagccatcttcttagcttcatccttttgtctcaaagcttgcttttgttcttcttgcttggaaaggtatctacctctgatgatgttaccagtggaggccaattcttcgtatttggcaacgtacttagccttggtagagtcgtaaccatcttcgtacaaccagtcctcagcctttgccaattggtctctcaatttggtcttttcctggtcggaagcaaatggtgcatattcttcgtctagcttaccacgtagggtgtagatgtactcttctagagcattcttacggtcttcggtttcagcaaccaatttgtcttgactagtcatttcgttttccttctccacaagtaagtttaattcttcaggttttagaccgaaagtgtgttcgacgatgttcaaagtatccttcttaacggtcttggtgacttccttgtattcaggttcagcaccttctggagcatcttcaggcaatgggatttcttccttaactgtaatgtcttccaaagtgtaagcttcttcgataatgtgaagaccagatgggtcacatctcaacttcaacttaactggaacggaagtagcaccttcaggtaattgaacaccagtgatttcccatttagcaatgtgagttgggacatcttctggcaattcttccttatgagtgtagtaagcttccataacgaagtcaccagtacggtgcaaagtgatcattttagtggatgggaaagtggaaccagctgggaaaacttccaaatgatcttcgtcttcgacttgtttgtcccaagagtaagacacagagtatgcgtgcatgtcttcgaatttgaaaggcttaactcttagagttggagagtggatagcacagatgaaagcagcacccttggcaatagcttcatcttggttcaaagtggttgacaattgtttgttgaaagccttggaaatagtttccttcaaaactgggatacgagaagtaccaccgattaattcgacgaaatccacatcctcaacactcaatttggcttgagccaaagccttgtagataggttcatggacacgttccaacaaaggcttcattaattcttccaattcaacacgagaaaattgagaagagacgtcaatgtcattcataacagattcaatgttgaatggggcagaggagttagcagacaaaactttcttcaatttttcagctgcagcaaccactctgctgtaagcctttgggttttcattaatgtcgatcttgtatttggtcttgaattcttgagcaaaatgttcagtaatggcacggtcgaagtttctaccaccaaagtgtttgtcccaagcggtacctaacactttgaattcacccttcttgaaaccaataacggaacaagtgtaagaagagtgaccaatatccactagagcaacaacacgaggcttttgatcaacgtctggcaaatctggcttgaaaacaccgtaagaaacagctgcagcagtaacatcgttaacaactctaactgggttcaaacctgcaattctagcggcatcggcaacaacataacgttgttcttcagtgtaccaagatggcacagcaagacaaacatcagaaatgttagccttggtttcagtttgaacggtgtccttgactctgtcaaagaacataccagccaactgtggggcagagaaaacgtggtccttgttgacgaatttcacttgagcaccaactttaccatcttccaatttaaccaatttgtttgagaagtatttagcttcttctgggaattctttgtcgtcgtatccaagaccgatgattctcttcaaattttcaacggtgttcttaacattagaggtttgcttgttcttaccagcttcacctaagaatctgtttctttgaccaaaaccgacaattgatggtgtggaacggttagagacttcgttaactacaatgtcaatacctctgtttctagcaacagccaaaacactgttgtggttacccaaatctaaaccaaatggagtactcattattattcactttcttctcttagtctatcttccaaactctataatataaccactattctttctggagaagtaagaataagaattagtcgttgatgatacttgagacggtttcaatttaatttgataaccgatcagtcttcaatagaggttctaaagtaatcaagacttttattgtagaatatactactaagaatcctcttcaactttatgtgatggccttttttcttcttttcctccctctcaaatttttcaattttttttttttccaaagctttctttgaccgtccggagtgactcgtaaccgtctagaaacttctagaagaaaaaaatcttaaggaggttggcggctaaaaggatcttacgtgtttgtaaaaatattagccgccgaatatcttatacacgtgactaatgtgctatatgaaaacgtataggcggctaattggagtaaaggatatttctatagattagccgccgagtatctatttcacgtgattctgtgattagtacgtgagaagtgatatacgatttcaatttggaacaaacagcagtaaggaaaaacagctggttgtatagagatgaataaaggatacggagtttaaatatcctgtaactgaagcacgggcgtattgtttaagattttcaaggttttctctccctgtgttcctgtgcaatggatacttcaagtacaagtccttccgtctcgaaggggaaacccaatgacaaagatcatagtctcgtcgatatccacaatcctgatccacaagtagttgatatcgtcaatagacatttggtgcatagtccaaataatttacaattacaaggggcagatgttacaagagatctttacaagtggtctaccgatcaacagcagctgccgttggagacggcaacggggaccgttccaacatcacctagagacgatattcatagtcctattccgttatcacaaagaagaagatctataagtttctctggtatgtcaattcaatcgtcttctccgaataactatctttcggccgatgtcccaggtacgacaatgacccatgaagaaattcgggcacctggtggatttaggagatcattcatcttaaggcagcatgagagaaaatacggtgctactgcaccaccaccaaattttttcacacgcaatttcattgagtttcttacgttatatggtcattttgcgggtcaagatctaggagaagatgaagacgaagacgaatacgaagacgggcgaggccatgaagatgaagaatcagttctgttagaacgtgttccaacaagagatagtaaaaagcaacaacgtaaggctactactttcaaggccattttacttttattgaaatcctttgtggggacaggtgtacttttcttaccaagagcatttcataatggtggttgggcatttagtactggatgcctattattctgcgcgatagcatcatcgctggcttttgtgcttttgattaaaacaaaggataaggttggtgtaagtgggtatggtgatttgggtaaggctctttatggacctaaagttgaattctcgattcttttctctattgcgctttcacaactaggattttctgctgcttatacagtttttacagctacgaatttaaaagtattttttgaaaatgctttcaatttccctgcggattccgttcctctgagtgcttatatcattttacaagcactaattttcattcccctgtcgttgacaagaaacattaccaaactaagtggtacggctctaatagcagacctgttcatccttttgggtttactatacgtctattactatcctgcactctatatcgctaaacatggtatcgctacagattctgtgcttttcttcaatcgttcagattggtcacttttcattggtaccgcaatcttcacttttgaaggtattggacttctaatccccattcaagaaagtatgaagaaaccggaacatttttatccttcgcttgggtttgtcatgtctattgtaactttcattttcgtctctagtggattgttgtgttatcttgcatttggtgctaaagtggaaacagtggtattattaaatttccctcaagatagtattgctacaatatcagtacaactgatctactcattagcaatacttttgtctacacctttacaacttttcccggcaattcgtatttttgagacttggactttcccttcaaatgcatctggtaagcacaatcatcgtgtcaaatggttgaaaaactatttccgcacaggtgtggttattttcacggcactcttagcttgggttggagctaacgatttggacaaatttgtttcccttgtcgggtcctttgcatgcattcccctaatctacatttatccaccacttctacatctaaaatcatctgatacacagacatccaaattcataatactgggtgacttgctcatttttttcttcggtgtaggagttatggcgtacacttcataccagaacatcgtactgtggggcaattaacatctgaactcattatgtttttagggtaataatgactttctaaggtaaactttgaccttcaaaactcgttggtatggtcaaaatatttataaaaattttctttgggcggttaaaattcaaaatataatatagatttcataatacatctctttaatcatcacctcgtatagagtgattatcacaacctttaaataataaggaagggtttgccacccactaagagttaatcactacaactgcaaatacagctttatagaaccacttcatatagcactataacgattgaaatgccaccaagagaggattgggagaagtataaggcacctattgaaggtacaggagatgagaacgccgaggacactaaaggtagtccactttctgaaggtgatatccaagtgttaaagacttatggtgcagcaccctatgcaacaaagttaaaggagactgagaaggatttgaaagatatcgagcaacgtattaaagagaaatctggtattaaagagagtgatacaggtttggcaccatcacatctttgggatattatgggggatcgtcaaaggttaagtgaagaacatccattacaagtggcacgttgtaccaaaattatcaagagtactagtgattcaaatgaaaatggtgaaggtcttgatggtgctgcaggtccaggtgccacatctgaaaatcgtgacgcggatgatgcagaggaagatgaagatgccaaatatgtgattaatttaaagcaaattgccaaatttgtggtaggattaggtgaacgtgtttcaccaacagatattgaagaaggtatgcgtgtgggtgtggacaggtccaaataccacattgaattgccattaccaccaagaattgatccttcagtgacgatgatgactgtggaagaaaagccagatgttacttatagtgatgttggtggtagtaaagatcaaattgaaaaattaagagaagttgtggaactaccacttttatcaccagaaagattcgctaaattggggattgatccaccaaagggtatcttactttatggacctccaggtactggtaaaactttatgtgcccgtgccgtcgctaatagaacggatgcaacatttattagagttatcggatctgaattggttcaaaaatacgtaggtgaaggtgctcgtatggttagagaattatttgaaatggcacgttctaaaaaggcatgtattgtatttttcgatgaaattgatgcaattggtggtgctcgttttgatgacggtgcaggtggtgataacgaagttcaaagaacaatgttagaattgattacacaattagatgggtttgatcctcgtggtaacatcaaagtgatgtttgcaacaaatagaccaaatactttggatcctgcattattaagacctggtagaattgatcgtaaagttgagttctccctaccagatttagaaggccgtgctaatgttttccgtatccattctaagtcgatgagtgtagaacgtggtatcagatgggaattgatttcgagattatgtccaaattctacgggtgcagaattaagatccgtttgtacagaagcaggtatgtttgccattagagccagaaggaaagtggcaactgaaaaggatttcttacaagcagtagaaaaagtcattaacggttacaagaaattcagttctacttcccgctacatgcaatacaactagagaaaactgtatagtacataataataaaataagaaaaatatcttgatgaatgcaatacaatgcaatccgttttttttatcaattcattcccaccaactaacaacacccatcccgtcggtttgacagctacctaatagtgcataggcagggctcttagtctcgttatatgcaacaccagcttcttctgcctgttgtcgttcttgctcctcatgttccctctctttgggactctttggtttaacatccacgaatacctcttgttccactctgaatcttatcttttcattaacgtcaaaatacagttgattgctttcatccatgggccatatccaagcgttttcatcaggactgtaagaacagccttcaaatagcatattttgtggtataaaaatatcgttgaaaagtcctaatagtgatactttaataccttcagctgtacatttcgagatccatcctgtgattacttcaccaacaaacggtttgaacacaagcgctctaaaggtaacattgatgtacgaggcaccatcgcctggtctcagttgcccttcatccacctctaaaatatcataaacggtaatgcagagccctatgtgtgggatcactttgtttgcatatgcattgttcagttcatgagttatagatgaaatggtatccctgtggaattgatctggagggatccttactaattcactgattttagacaatgtgaacatggaatcgaacaccagaaccagctgctgatagtagaatccaatcggtgatgggctctttatcgtgttattttcttgtgtatgcctctaatgttgaaaaaaatttcagcgatgagatgtgatgagatgagatgagatgagctacaaacaagtaccaggagacaaagaggcataaaagaggttctgtagctgcttatcatgtcgaaaagattcaataaaaagaattcccagaagtacgttgtggtacatagaccccatgacgatccagagtactacgataacgatgcatctgagcatgttttggtaccagcgtcaaatcctaacactgcaaagactgctgaaagaccaccaccattagttgaagatccggtgcaaactgctggaaagaaggagaacgagcacgttggtgaagccatgttgtatggtatcaactttgacgattcgaaatacgactatacacagcatttaaagcccataggaaccgatccagagaactcactatatataccggccaagaaacctgtcgataagactaaatctaagaaatctatcgacgatctttttgtggagcctaaatatcagaatgctgatcccagtaagaatgagcccttgtttgctagaggtgtagctaaaccagagtatttggaacgtcaacaaaatgttgccgatgagctaacgggattcagacctgatatgaatcctgcacttagagaagcactagaagcattagaagatgaagcttatgtggttaataaggatagagaattgaggaaagcgcaagaaaataccgatgaaaacgatgaagatgatatctttcaacaattgcttgaaggtggacaggcagcagacgatgaagaatttgaagacaacttggacgaatgggatatagacaatttagatgagtatgaggatgaacactatcaaaaagagatggaagaattagataatgtggaaaacttagaggatttaaagaatatagattatcaagcagatgtgcaaaggtttaaaaaggagaagaagagagatatatttgaagatgaagtatcttcaacaggacctcaaagtgtggaacctgaagatgaagtagaagaagaagaagaagaagaagaaattgatggcctcggtgaattgccaagtattaaacaaacaaagggcaagaagcgtaaggatcgtcaaaagatgggtacaaagtctgatttaactggtttttctatgacttcgagtgccattgcacgtactgaaaccatgaccatacttgatgacaagtatgataacgtcatctcaggttacgaaaactatcaagacgagcaagaagacttggaagaaaaacaaagtaaaccattcgatatgtcacaagagaggtctgactttgaatccatgctagatgacttccttgacaactatgaattgggcaaaggtggtcgtgaattccacaagaaggatgaagaagagcaaaatatgaagaacgccgccgacgaagtgagtaagggtaagctctcacagcgtagaaacaaggagcgtaaagcaaagagtacaaaggggattacgaacagtttaagtagtttacatatatagccgcccaggtccaatacacgtgactgggtacccacgtgaatatcacgtgcttttgtttacctcgatctcttcccctttatttattttgccatttgtataagaatccacaaagcacctaagtgtaacttatcgttgcgaatatctattattgctaatagccaaagcagggagattagttgttcatatagttcgatatgagtagtgaattgaatcaaattaaacagcaagtagctgatttgcaaagattggttaaaaagcaaagtctaatcatttcaaagaccggtcaaaatgtactcgagatgcaagtctcgaaacagagatcagatgtaaatgcaatcggatctaagtcttctgaatctaaacacgggattcctcaattagaagctaatgacgtagtaactaacgaggatttagttcaacttgtgggagaactacaaggccaattggatactatcgaggaaagaaacgttagaagattagtcaattgcgtcaagtctcaaccagatgacatcttagctccattgcccaacgcagatggtgagattccaaaaggtggatctgaaggtgttttcccaacgactctaaatgattttgaaaagatcgatgacgtggctttgtttaaattagctaaattctatgaactattgccaccaagtctaaaagaacaagagaaattcgaagattttatggaaggtaaagtggaagagtttcatattagtgaaatgccagacgaagaagtgcaaaaggaactgaaaaattactcatcgggtcaattggaagatactttcaacgaattggccagatatttgggtttaagggcaagaagaggaactgccacttggtaagaggtaattgtaattggattttaattattagtatttcttcgagtttttgtatttctataatacaatttttctataaccacctatctaatcatttgacacctttgcgcttggagggaggtaaatcggtgtgcttgggacgctttaatgggttctttggctgtaatggttgagcgttggggaaaattgcaacatcttgctccttgacaattcttctccagtccataggtttccttacatactgatccaagtgccaatttctccaaacacgtttaccgtaactactgtttttgactttatcagattctttcaataggctattggcaatacgctccttgtataacgtcaatttagccgtaaattcccatagtttatccacaatgtgagatccgtatgcattacaagacatgttaaccacatctttgcacaaaacgttgagaagtaatttcctcttgatggcatctacaattgtaggtttgagtacatgttccacgacatgagaaaacacaccatggtaagccatttgtaagaatctttcctctggcaattttaacatactttcgatggtaacatcaacaaacttggaatcgtaaccaatcaattgttccaaaaacaaagaacgtcttctctcttcagcagttggccagtcgtctctcgtgttacctaaagttgaggagcttaacaatagacaactttctaaaatgtttctgttttcattttgttcaggatagtatttcaccaacagttgatttatcacttcgtctctcaaatagttatcttctttgatacttgcttcaatgatagatgtaccaaaatcaatattggagttcagcaacatactcaactgtggtactaattcttccaggatttctttcacctctttatcctttaaatgtcttagaagagcttggacgacgaatgcaccagtagtgtctctttgggccaatttggttatctttggtttcatgtaaagattgtataacctttccacaaatttggtcctggcaaagctgatgacgttctccaagaaatgagaacccaccgggtctgatagtaaatattccaaaaaggcttcttccttggcatcggtctcatcggtggtattaaaaacgagtctccagaaagatctttccctgtcgaatataccttccacttgaatgatcaactgtatgacgggggaagccactggatccacgcataattctctgaatttagtcacatatgtggggctgatgtcagaacgtgatgcagcgccattggtaaacccagcatataggtttttcaaaaagtctttcaattctagtttgaaagattcaggagtttggtggactctatcgaaatcgtcattatccttgatatcgatcatctttcttgcaatcttggacttctttgatctcaaagtcgagttattctgagtagtttttggtagatttttggacgcaagaattaatattagcagtctgagtacgtgagaggcatatctgtggttaatcatcgcctttagatgtggtttaacttcgtttaacatgtaaagatagacattttccatagtgataaaggattcctcatcggtttcaccatcaaagcttggggttaatagttccttttctaccaatgctgcacctcttaccagtagagtctctaagacgtgagatgcgtatttatgacatgataaattgtaaaagacaccgttgaaagccttgaagatagattttagctgttgatcatcgcaatctagaattagtctttccatcaatttggaacaaatttgcgaaatgactaatttgagctctttgcctctggtctcttcaattacattggtaacgaactgtttcttctcttcagcattatcaaatgcatccatggatagagtggcttctgcatgcttaaagtattcaagttcttctctatctagcacaccaaaaaacatttgaggatcggagtctgtaccattggatccatcaaaattatcttgttcatctggcacatcgaattctttggccggtttaaactgatctttctcttgttgcttaagcaactttctccctctaggtttacccatgttagtttgaaattttgtaaggaaatagccaagatgcagttaaagactcttggagcttgaaggaatctaatggtttgtagacttctattcttgagctcatctcatctcatctcatctcatctcatcgctcctgatagaaaaatttcacatcacacgtgacatgggattacggaatactactgtatgttaaaatataatatttataatatgctaacacaaatcactatattagtcgtcttgatcccaattacctggtctctttgcctgtggaggtgctggaccacctgctcttttagccatgataatttggtccactgagagcacagttgtggcagcttctgtggcgacattaatggcgaatttcttaggagccaacaaatcgtagacactatcttctctgatatctgttaaaccatcggaagtgtccttcaaaatgtcaacacctttgaaaagacattcctttctggcggcttcctcatccttttcaccagagaccacggtatgtgcagcataaagattgggcaaaacttcgttgacttctaatcctgccgtatccgctagagtacgtgggaccacttcgaaagctagtgcgaattgcttaatggcaagttgtagaagacctggtgttctttcaccgtattttgtaatcctagaaactaattcaatttctgtagcacccgcacctggtagtagtttcccaccgtttggagtcattagacccttaatggctgcaacaccgtcattgatggctctttcaatatcatccaaattgttttgtgtagcgcctcgtaagataatggtagaagtacgtgtagcctcttctgattcttgtttaaagacggtaactctgtcaccaccaatttccattgttttgacagtttccacaacaccaatttcctcaggagttggtgcacctaaccttggtaatggagtagcaccgcatactctgcatattcttctcagttcaaacttacttgggactttgagaactagaatgttgtatctgttcaaatagtgtagtgccaattcaccaacacctgcacctgctaccacacacgtcacacccatatcggcaatctccttcatcattgcatcaatttgcttctcttcacccttagagaaatctagcatttcttgagcgttatgtaaaagcacagtaccctttgtctctgtattggcaatgtctattggacaagtaaagacagcaaccttgtgtttaccgccttcaggtaatgatttaatgtgaccttcaggttcacggttgaaaaccatacctttaatcacagtagaattgacaagagaaccacccataattttaacgactctaatagaatccacattgaaatatggtatggtaccttgggaagattggggtaaaacgtgagatacggcttcagcaactaattgacttaatagatcctcagatccatattttttagatgcaatgacaggtttaatcactttaatcaattcttgtggattactcttatcgataacatctcccacgactaatttatccaattcttccaatgtaaaatttttagccatattaaaaccttgaataatttccacagctgaaagacctaatgcaattaacttctcagaaactataagcagttcacctgcaagaaccatcactagattagtattatctcccatatccatcttctgttgttctgtcgccattacaagaactttaacagcaggatgaataatatctaactctcttagcatggtagcagcatcattggtaactataattttacccaaatggttgacaataatcttatttctaccacatggacccatagaagttaaacacatctgatggatttcacgaatggcagcaatagatttgttgatctgaccatcggaattggagtaactgttgtaaccctgtttgaaaaggccactattaagattttgtggtaatttgagagacatagttaatcgatacctgtgtactcttggatgtctctctacactggcgatgagttgtcaatgggttatactatggtttattagttcaattcaagatttttcaactttttttttcatcatagcgaagttaaaaaaaagtttgccaccataataaagaaaacgtaatttaatgatcaagaacgaattggaaagcctgagagggatgataccagtggcaattgattatcagtatcagtattaactagcgttgcactgcgtgattgtctgtcacatggtcttttttgtcattgtatactcctcccagataatgtgttattaaccttcgtatgcttcactagctcagtcggaagagcgtcagtctcataatctgaaggtcgagagttcgaacctcccgtggagcatattttttgttgaatagcccaataaatattgggaacgaaataatgagtaaaacttcaagagttgaagccaacattctggcgtttaaagactatcactcaaattataatagtaattttattttggataagtctattttcttgtctactttatgattgaaattgcatatcttgttctttctcatatacactcggcctttcctcatccacgtactctagagaactgcccctggttccaggttacctgtagaatcgatttaactgcattgtatgttctcttccctcctctattatcaatttattcccattgtcctccattcgaatcccgtcagtagcatcttgtctctttttttcagttcaacatatttttttcttaattaaggcggtaaacttcaatatgactgatagaaagaaaacaacttaatcatactccgataattgtcagctcaatagcacatgaagcctccatcggggttctaattgtttctaattgaggtggattgcatttgtagcgaagtgtcttttcgcaattgtttattaattagattttacgaagctcaaagtcagaattcaaatgatatctaattctgttgattataacccgtttgaggacattactactattttatcagctaaggaatcccttaatgatattgatcgattgatatgtgccactaggcgttacaaattacaactggcggatgagataaaagaaagtgaaggacaagaagaaagtgacaaggtagggagaagttcagatgaacgtcgattcgactttggtaaggtcttccgagaaattgaagagactaagaattttgcatctggtacccaatctacgatttcgcaacttacagaggggatctcacatttagataatgccaaacgtaatttaactcagtgcatgacgttatttcaaaatcttcagattttgactgatagttatttccactgtaaagaattgattggcaggagtgcatataaagaaatggcttcatcatataagatgatgtgttctttagcagaaaatactttcaaaccttataagtctgttgatgaaataaacaaattactggcgtccatttcacgtttgagggctgatacttttgaaaaaattaaacatagttattctagggtactgagtgggaaagttgcagaaagtgaagccattgaagctgaacttagagaaggtgcctgtgatattttagattcggattcaagcggtaaagctcaaattattgatacttgtttgaaaaaactgttgaatgaaattggtgaaatatttagggttgacgacgaagcaggctctctggagaatctttctagaaggtacatcttcttcaagaaagttcttaacaattttaattcaaaatttgcacgttattttttggcagaatgggaaatgccgctaagattaacttcaactttcttcaagatgacagccaaagatttagagattctcttgaaaaaggagtttcaaggcaaagatgcatctattgaccttttcatgggggcactacaagaaacattagatttcgagaaatacatcgatgttaggttttccaataaacttcgtgagacaaaattatctcaacattttgaatcatatttgtcattatgggtttcccatcaggataaaatgatgaatgaaaagtttctttcctacatgagtggtggggatctaggctcgaatttaggcgattctttaatcataccatcaagtgctgatttgtttagaacttaccgttcagttctgactcagacctttgaattaattgaaaataattcaaacaatgggatcttagtgtcattagcgaattttttcactaaatggttaatcgcatattccaataaaattttacaaccgctgatactgcctgactcagaagaaatgcaaaataaggaagaaaccataaaatatacggtgactatgattaatactgcagattactgctccgtaactattggtcaattggaggagaaattagcagaactgagtccggatcctgtaaagattgaacaaagttttgctatggttagagatacttatgatggtctttcagcaaagggtaattcgattcttttgaatcgtgttctctctgtggatttagcattcgtggcaagagaatttaataatttagattgggcaagagttgttgttgaaaattacagtaggtacatgacgactttgaaagaaatattgtgttttgatccgtctcctggtagaaaatctactttacagctaattctttcacaatttaacagagacgtttacagttggaattttctggataaggtgatcgatcaagtgacccaggaatttagcggttacatcattcgactcttacagcctatgcctccattcgctacttctacaagtactagaaaatttgaccctataaaagttgtcagcattggggaacaacttttgctagacacagagttgctcaaagaaattctctatagcttacctggaagtgtttctgatgaagccaacagtgctcaaacgacggcattcaaaagagttaagaaacacatagacacaaatttgtctcaacttttacaatttatcaagattttagtggcgccattaagttcagtggatgattatcatgaggcataccagaaattgacagattataataccagtagtgtagtatgggcatatttgctgtcactgaaaggtatcccatgggattttaacctatggaaacaacattggagtgcctttgatatggatcgtgattcacatggtagtaatgatggtaacaaagatttattcatttttaaatggaacaccaaattacttactcaattcgaatataacctattaagaattcaagatccaacatggtctaaatttgtgaaagaagaactggaagtaaaacctactccaagaaatccttccaaaattcgagttcatactaatccaagggcatatcaataccaaacacccccttcggacggtccagaatcacatcaacagcaacagcagcaatcacctcaaggtactccaacgtcacctctggcgaatgttaaaaatttgatgactagtaatagattcttcgacataggtggctgaattaaacaaaatataattcagccttacttctacataatgcaaattaatacctgtaactaacttgagctccgacttggtgatcattggtgcgaaatgatttaaattgaacggtttcaccgttattaattggcttattatcagaatcactccattccaatgggactttggcattagcatctgtgtacgctaatacgttaaaagtatagttgccctcattgttaagttccgggagaaatgttacactggcggtaatctgccttatgagagatcttatctggttctgagtctcattatcatcgacctcttgaggcaattccacttggttctgatccagtttgctgaattgtactacatcaaaagaccattcttccactttatcaccctcatctttgtcaacaatgcataaaaccagtttattacatttaccaccaactagccatttgtgtacctgagccagtattcttcttatatatgcctttagctcttcatcatgagttttgagtaaggttaatccatatttccttatcgttgtgaagtcctcttgtgggtagacacctctttgataaagaattgaattgatactatactcgaagaattcagtaatagttctagtagatcctctcaatgagatggaatttgacatgtacgcttaattcttgtggttgttatggctttgatcagttttattcaaagatggatcaactttaaacgtcttgttcgaaagatgtatacaaaggaaactactggccgataaaaggaatcaaagaaggattcttttcaagatggtatgtggtgattccagttggaatttggtgctctagtgtttgaataatcttactaactgtcaatttcgtagcatggtgttaaaaggaagcaatggacccaagaactgttgaagcagaagaaagaacaggatcgtaagagaattactcagtatagggggttagtggataaactactggattctagagactctaaaacgtacaatatggaagtcttcaaagaaacaacccaactactgaggataaatccagagtacaatgcaggatggaactatagaagggatattatagaacacttatcgcctgaattgaaacacgagttctgggaagacgaattggcatttagtatggcattattgaaagattatcctaaggtatattggatttggaatcacagaaaatggactctagaaaaccatatagataaatcggttaaaatatggctaagggaattagctatagtcagtaaattattacagatggatccaagaaattttcacggttggcattataggagaattcttgtagctgaaattgaagggaggactggtcaaagcagagatggggaagaattgcaatatgcaattgataatactaataaaaacatttctaattattcagcttggcatcaaaaagcaacactaatcccaaaaatgtttgagaaagacgagattaaggataagaagaaatttatacaagatgaatttacttacatcaccaatgctatttatacagatgcagaggaccaatcggtttggttttacattgaatggtttgttaaaaaccatatagttattgatgcattagggcgtgatgaattgatccaaaaattacaggaattgcaagagaacatcttggctattaatgaagatgatttacaattttcaggcaaacagaacaactggtgtttgaaggtcttgattgtacttgaagatgttcaaagaaatttaaaagtccaatttacaccacactctcacgaatatttggcacaactaattgaagcagatcccatgagaaagaatagatatttacatctattacataggaaatgagaaagtttcatatatcatcatactctaccaccaacggtattagatgaattagttttgatttcatcttgaactagtttaggtgaaagcacatatcttctttctcgtactgaataatcacgatgtgaagtgaaatatggatccatttcaatatctttttcattaaaatcgtgaagaccaaattcagggcctgcatttttctttaattcaataaacttttccaatccaaaataacttatacctgggggtatattatttttgagatcacatatatcaaatgaattgatgtagaaatttaaaatgtcgaaataggcctcgttcaacgagtatttatctgtttccaaattacgtctggctaccaattgaaaccaatctgatccaggtgttaaaatttgataggcaatcttcaatacagctaatgcaatcgtatgttggggaatcgttaaaagagtgtccaattttaaaacatcatatcctatgacccatgccagtagacacacctgatagtctaaattaaaagttttgccaaacttaactacgcattcatcaatgtgaagaaaattgtttgttctgtagtcaaatgaacaagattctaatattcgaagttcaatttggaatacacctttcttaaaattatctaacatttcagaacttggtttaggcacatttcttaacctcaacgaaacactgcagagttcatttactttcttaatagtttccacttgcttacaacttaatagaagactgctagtagccactgtatagcataattcagtctcaaatctgttgaagacgtgatatctctggtaaaaatatatggcggtttctaacgttctacgtggaaaattcaattgtaaacatatttcactcataaacttaataacagctaatttcttctggttataagtacgtcgatcggttatggagtctctttgaagccttgtgagttctctcttagtcaagtacggccgggaaagaagcagctgtgtgtcaaatttagttgacatggttgattaaacactaatttggcagtcccaaaaatcaaagaggctgctatatgaaccgctattttcaaccttcattagttgctcatctcatctcatctcatcgtcatcttggtgaaatatttgactactatgtaaatttgatcacgcgctacgagctggatgctaagatctataatgctatttatactatcatatttagaattctattggttgatcaatctcgatgtcaaggattccaagtcttctagtgtctctggttcttccacttccaacagtccgtcatcttgtttttgttctctgtgagcggcatgtttcttccttggtggttcctcgaagtccgattcctgttcatcttgttcttgtgattcattttcttcttctttatcttcaccttctgaatgctcatccatatcgtcgctgaggtttcctgttcccagtagtactgttggttcttcatcttcgctgtagtagctttcattttcttccatttcacgtcttagagcctctagttgctttctcttcttttcttgtcttttctccttagccaattgcttatcctctacatccttttgagccatgatttctgcctccttagtcaaaaattcctgcttttgactcattgcatcacctttttcatggaattgttcttcgtcttctaattcgtaaactgggtgtgcttggccgtcctcatcaaataccatcttcgatgcattaccctttgacgctagagaagcctttttagataatgctttcctaacagctctcttagattgaggtgcaatcaagggcggcagatcttcttcctttaattgatgatcaccacgtttcaatgatatgaagtcaccatcatcttcatctgcctgagcttgggatttagtaatgttcagataatgctcacttaaaacagtttgattcttacgttcgaacattttgtcgaattttgttctagcttcctttggtttatcttcgaattcaccattttcatcggctttattcaattttagtagttgtctaggagcatttttcaagtctttagaacgttcgatggcacccattcctctgagcttaatttttggtgcacctggtaatcctaacgattgggcaaattcttccgtcggtaactgatcaaatttgaaaacttcgtgatccttttgaatgtagatggatctaacgtatgatatgaatgccttttgacccaaatatttcaattcaggatccttgaacaataatgattgtaattgaggtttaatagattttttctttgattgcttaatatttagcatgttgggttcgatccttctaccctttaacctttgtaggaatggttcattttcttgcggtgttaacatgatcaaagatttaccttgtttaccgtatcttgcagatctaccgactctatggatgtaagtatcgacattttccggacaatccacttgcacaacccaatcaactgccgggaagtcaatacctcttgaaaccacatctgtagcgattagacacacttgctgagctctgctgaatttgtccaatgtttccgtacgtgccctttgtttctgtctaccgtgaaggtgcatcaaagatataccaggttgtaatttcctaaaagtttcatagacaaaatgtacttgtttggaacttgaaaaaaatacgatcatcttacatttcaaatgagtttttatgaaactgaagagcgtatccaacttatctgctagttccacaacgatgtagtgctgttgcaaagtttctggggtttcgggttgtgaaccgctgacgttagccggtgtacctacggtcttatagtccgttagtgataatcttgccaaatcgttcaatgattgtgattgtgttgcagagaaaagcagggtttgtctaataggcggtaaattacttacaatagcgtccaaagtctttttaaaccccatatcaagacatctatcagcttcatcaagaactaacatttgtaaattatcaatgttaagtcccacagactgatccaaatgctgtaatagtctacctggtgtacctattaaaatgttaattttggaaattctttcagcttcaaatttgacgtctttaccaccaataactagacctgcagaaaatgaacaatgggtaccaattttaatcaatacttcatagatttgcatagctaattctcttgttggtgaaataatcaacgcaccgacaccatcatattcagtccatctctcacgatacaacttttccaatacaggtattaagaatgctagggtcttacctgaacctgttttggccgcacctagcacatcgtttcccttcaaagatacaggtatggaatctctttgaatatctgtcaatttaacgtaggaggcatcttttaatcctcgaagaactgcattacttagtggtaaatcctggaaataagttgctttggggttgttaaactcttgcgttttagtgtgaagctcttcgatatactgatcttccctcttacgtatttgcttacgctgactggtcgttagatgctgctttctaggcattttaagacttctataaggctctattctgctatacttagtgatctattagcatgcgatgagcttgttgaaatttttcacttaagtttggtgaaaaaatgaaaaaaaaagaaaacatgctgacatgaaatcgctaaacagaaaatccgatgaagaatactgcgatacctcagaagaggttcaggcccactgtcttgcccgattttagaccttcaggattgttagagctggaatctaacaataaagaaggtgttttgttaaaacatgtagagcctgccgatgcatgtgaacccaataccttctacgccaagacttctataggacagcggcctctttacaaattgatggtttatcgagatgattcactggtacaagagtttgaattgatggaaaaaagtagttatatagtcggcagagcttctggtgaaaccgtagtagcagatataccgattgaagaggatacatgctccaagcagcattgtgtaattcaatttcgtcaacaaaacggtcagttgaaagcgtatctgatggacttagaatcatcgaatagtactacgttaaatggagatgaaataccgtcatcccattatgtacaactacgtcctggtgatattatatcatcgttggattcacaatacgacctcgttttcatgaatagctaaaataggaactactacttaactttaattcttatgtacaaatgctaaagagcttacaattcgtcgtgttcgaagtaatctccgtcgtcatcttcttcgtcttcttcatcatctggtgatgcaccttcaccagcgccaccgtaaagcttagatgtaattgggtaagctgccttggacaatgagttgaatttctcttcgaaatcttcagccatagcagaatcgaaattatcttctaaccattctagcacatcagaagcagcatctaatagagtttctctatctttttcttctaatttttcacccaaatcaccattaacttggtttttcaaagagtgtgcgtagttttctaccttgtttctagcttcaatcttcttcttaacagcagcatcttcagatgcgaatttttcggcgtcctccaccatcttttcgatttcatctggagtcaatctacccttatcgttggtgatggtgatagtttccatcttaccagtacctttatcagtggcagaaacctttagaataccattggcatctagagcaaatgtaacttcaatttgtggaatacctcttggagctggtggaataccagtcaattcgaatttacccaacaagttgttatcctttgccatagctctttcaccttcataaacttgaatcataacagttggttggttgtctactgcagtagagaagatttgagatttctttgttggaatagcagtgtttctcttgatcaatggagtcataacaccaccactggtttcaatacccaaggttagggcgttaacatccaataacacaatgtcttcaacaccttcttcaccagaaagaacacctgcttgcactgcagcaccaaaggcgacagcttcatctgggttaataccctttgaagtcttcttaccgtcaaagaaagattccaacaattgttggaccttaggaattctagtagaaccaccaacaagaacaatatcgtcgatatccttcttgcccaaaccggcatcttccaagaccttttcaactggtttcaaagtcttcttgaaaagatccaagttcaattcttcaaacttagctctagtcaaagtttcactcaagtcaataccatcaacaaatgagtcaatttcaatacgagtggacatttgagatgaaagtgcacgcttagccttttcagcttctctctttaacttagccaatgccttattgttatcagaaacatcaataccgtgcttcttcttgaattgtttgatcaattgacgcacaatcttgtaatcgaaatcttcaccacctagatgggtatcaccagcggtagcttgcacttcgaaaacaccgttttcaatagacaatagggaaacatcaaaagtaccaccaccaagatcataaacgatgatttggtgttcgtcactcgatttgtccaaaccgtaagcgatggcggcagctgtaggttcattcacaattctcaaaacgttcaaacctgcaatagtacctgcatccttagtggcttgtctttgagcatcgttgaaatatgctgggaccgtaaccacagcatgtgtaaccttcttgcccaaataatcttcggcaatctgcttcatcttacttagaaccatacctgaaatttcttccggtgtgaagactctttcttctcccttaacggtaactctaacaccaggtttacccttgttgtcaacaatatcgtatggcaagtgtttaacatcacgttgaacagatttgtcactgtaacgcaaaccgatcaaacgcttgatatcaaacactgtgttctttggattagcagctacttggtttttagcagcatcaccaatcaatctttcttcatctgtgaatgcaacgtaggaaggtgtaatacgattaccttgttcattagctagaatttcggtcttaccatttttcataacagcaacacatgaataagtcgtacctaaatcgataccaatgacggtaccatagctctcctcttcacctctaactaaaactgagtttgtacgtggtccaagaggcaaaaccactaggaaaagcgtatacagaataacggctaatggagccagccacctgtttgaaagcattgtagaatacttcttcttatgttaaaacttggtaaacaaatgcacagaagggaacaaatgtgtattctcaaaaggttatttccttttatatgtttaatggttaattgaacactgtggtttcttaaacgcgtgttggataaaataacacgttggcagtcaccgaaaagaaagaagcgcgtggaatccggaagaaaatgacagctaagcataatggaaaggattatacaggcaccggaatgaaagtaagaatattactgaataagtagttgatacgtcggcggtaagagaatagcgtggtctgatcgtacggattctatcattacctcagctatttttttaaaaaacaaaaaaattgaaagaattccttagatatgcgcaaattgccaattcttcttggcaagatttgtttaatttgccgtattaatctcgagtgattgacgctgatgtacgtattactatagcgaatatccctatttactgaagttacgctggggcgccagtttgtgctgtcgtttttgtttgttttttgtggtgtcagcgtaacctggcgcgggtgaaaaatgataaaggaatgaaatacgtaatgggtaacgcggtcactagtatagctactgctgttatagatacagatcgaagagagtgatgctttgtagtgataaattgctgagaactctgttgtacaacgtactttcccttgcctgtgtgtttaagtgtttgaaaccctaaggttttccttagagcgtcagagctcgtcccaacaggataataataaaacatttttgccgcgatttcgtggtaaagagtttgtgtcagtgagttgttataaattagggtctagtaattttcacattgtttcaattttacaatcctcactgttcgcaccaataactaccaagcatctcaagttctaaatttttgacttcatcactagctaagattaattttatctaataatattacaaacaatatgacaagtaaaggaactgttcttatttattatggttttcgtagtggtaaatcagtcgctggtgatactgggatatcgtctgaagcttggacgtcgtattattatcatgacattggtaaatcatttcgagtagctgccaagagtaaaaggttgaattcaaaaggtttcgaccgtttgcagagcagtgatggagcagggttaataatcgatctttctccttctttacaaaacgacaatgacagtgctacatgtcaggaagattgtttggaatcaactttggaacaaaatgagtttattgcctatagtgctgaagctgcagcatttgcccaatttgcctccatagacgcaattattctggcctccaatgaattggctaatgctaactgtcccaaagtctctcaagtcgagcatcataaggtcagattttggcgtaataaaagaagtagaaatgatgaaatgactaactcttcgaaggatttgacagagagacctgccaagaggcatcattttagaaagtggttgaacgaagttcgagacgaagtagatttgggttacatctatgaaaaccgtaatagagcttgtgctgttgccgctgaggcggctcgcatggcaactatccgtaataatgcgagagcagcagcaaaggttggtgcaactgcaactgcccaaatgggtacggttcgctctcgttccagaaagtccattcaagctggtgctttagcgactgtaaaggctgttcatttgggaactgtcagttctcatgccagagaatggatgggaatttgtgcattggaggccgccagttctgcccaaactaggttgtttgagcaacatgctacctcagtcatgcattcaaggatttctacttctgatcaagaaccattttccaataaaaatgttgaaggtgagattcatcacggagctcaagatacagaggagtatgtccaaaatatttcacaaagtacagtagtggatcctgaagatcgaaatatccacaaccacaactctcagcccctacaagacagcagctcgggagaggatattaaaaaggagacaacttcaaaaatcgcaggagtttatgaacaatttgaagctgcttcaccagccttccccaaattagagtcggggccattaatcgaagcatgcgggacatattcaccaatcgaatcacaaagtgaggcaaaatcagaggaggaattttgggactgtatatcacccaaggagtctacctctactgaatcattttttatcgaatcctttgataaacaaccaagtaagcttggttctggtgagctagcacaagtgattgaaggtggagatttcgagaataaactttcttccaagtcaaacgttctggggtggtttagtaagacggcaaatgacgacaccaccatcgcagcaaaaactctcgaagagaatactcaggaatgcaccacggccgctgagactaatgtctggaaaagtcttggaagacaactaggacttttcaaaaaggaagaagcacttaattcagatatggaagtggtatctccctttggcgataaccaaattggttacgccttttaaacaaataacaattttttaagctcttcttgtattagtatgatcaaattattttggattttggttgatttctggaagtcttctcttatttcttcttacaaccgatcaaatacaatagaccgtagatcattgtagatcattgtagatcatttttgaatcacgtgattcgagttgtgttaaaaagaatacgggaaagaaatacaggcaccaaatggtactttaaatctatccctgctctttctagccgctgatggtattctcattcttcgaatagctttacagtcatcattggccacgtaagtgtgcgatccggtgaaaaattattcttatctcactccatctcatctcatggaaataatacacatatctgattaaatctccatggcgcttgcaaatgttcatttgcggcacatggagacggctcttcgtcttggaaggtatgccttagatcatggtgagactccagtggcttgtatcttcgttcatattcctacagatcaaattgtagcattcggaatgaatgacactaacagatcgctaaccggtgtagcacatgctgaattcatgggtatagaacaaataagggaattcgttagtcctgatgaactcgttcccttctttggagatatagcactctacgtgacggtggaaccctgcataatgtgtgcttccgctttgaagcaattaggtattggaaaagtaatatttggcgctggaaacgatagatttggtgggaatggtacggtgctaagcattaatcaagatagttgtactttaggaggaaagcatgaatcgatacctggcgtcttgagaagagaggctatcatgctgttaaggtatttttatgtgagatctaatgagaaagcaccaaagccacggaccaaaggtgaaagacttttggataaggaaaattttccaccaatgcaatggcaagactatatagatcgagattcatttgcacaggaatttggtgacgataaaattgcatgttacgatgaaaaaacagattggaccaaagatgtgaaatgggcattgattgaacagcgtcaggatggaatattggaggagctaaagcagcatcattaccaatttgggctttggcttaagcacaaaaaggttaggcggtagccaaaaaaaaaaaaaaaaaaaaaaaaaaatacgtaattctaaacctacccactatatatatttatctaagctattgtttttgttttagtgatctttttctttataaactctcgtcgactttaacccaagcgtctagcatcttttggtaaaactctatgtgatggtccgcgagacttcccaaagaatcctttaactctttggtttttagctcttcgaacaacgccacttctctcaacgtttcttgttcaaatgcatctgcaattttcttggcagattctaattctcctgataaggaattgattttaccctccagtttgtctattttttctcgacgtgctgcctcctgattgataccggcaagctcctctaatttattagtgaaaaaattcgaaccaccataaccagatatcaaattgtttttttcattaacagacttagttaaatactcactcagttcttcgtaatcaatctgcttttgatccttcagttttattagttggcccatactatcgatataatgctctaaatcctttaaatccacaatatattcatatgctaagtatttgctcaaatcacggaacccatatgaaagttgtgtaataccctcgttgaaaaccttggcttttttcgctaaatcttcattttcaccactgcatagctcttgtaaatcttgtaaatttgcacccaatgttgcatagtcttcagatatactatcatttttcttaacaactctgtggaaaatcttatcaattttagcaacgttatgatctaatttatcacttttctccttaatctctacgaattcgtcactctgtttgtgtactgttttgaaagcattcataaaggcatctgtcacctcctctttatttgtttgcaaatgtcccgacaaactcttgcgataagcatcccagtcgttactcacaaggaaaaccattaaaacactcgaattggataagactggatgattagccactcgccttaagaaattttgtaaactgtgacatctcttttgcgtaaagctttggctgaatctatcaccagcaatgtattgaaatactttcttatctggtaagggagggataatgcacgtagggtgatcattgagtaaaatgttgtaaagtagtaataggtcgctgtaccttcgatgaaccacgataatctcatcgtcacttttatggtttttgagataagctggattatcagtcttagtagaaatctgataactcacgtatgatgaagttgatgtctggtcgccgtagcgcttctgagggtctgacaccagtatctccaatcggtactgcggtttacgagatgcttcaccccccggtaactctcccacattatggcttgtcatattatttgatgcttgaagttaaatccaaagtttcaatgacctcacaaaataccttcctaaaggcccttttccatgagatcttcgaccttgtaaagcggtctctccccttgccacctttacccatttataaatcctatcaactcttcgtgcaaagtgatggtaataccggggggtaaacttgaatttaagcgcccaattgaggaattttagagcttttggttggatctgtaactaattttgttgttttcctacgatacgaaattatgctagtggatagtctttaaccactgcctttgtctgagaactcttcttcaatttcatctattatatcccagacgacatcctccgcaatctgttcgtcaaaaagttcttctaacaattttgctggcttgtttagctgatcataatatttacaatcttgttttgttgtaatgatacgagctgtccctccattgaagcagctgatggttgggtagtagcccagcttgttattattcacgtacttgtttctcaacaagataccagtacgctttgcattatgaccaggatcatcaacaccatttttccaataaccaaagtagaatttttcgttgtattgtaattcgctaaatggtggtaggaaaggtttcaaatctctaaaagcttcgcctaggggttcgccattcaaatagacggcaagaaatgaatcttctaattggtaataatcttgcctttctcttttatcacttgaatagtattccggttttgtagtcttcacataatctgtagcttcaaaaaacaattggtttttgtaacgaatggcaatgtgatctctaacaacattactatgatcaatatctgctaagagagcgatttggaagtttttattggtagtctttgatctcttttttggctgttcgtggtcttggtaagtgttcttagtactctgcacaagtgcatctaaccttctttgggtatactctttagcttggtcgacttgggtctgacagctaggtaactgcagtagaaatcctagtctatctcctggcttcaaactgtgtgtccccagtgattgtgcaaccttaccttcgtgaattgactctaaagatgtatctctgatggcatagccgtatgaatcgaatccaacaggtgattctagggatgcctcacgtttagatatacccagtctcacatggggagtctcatttattatatccttgcgtttctggaaagaatgaccagtgtcaaatcctgatggggtaccgccttgcacaacttctacttcccagtaggtcaatccttccttaatgcaaacatcacatctggctgtacgccaccccattgaattggatacactaacacattcgttattgcctcgattcaatgatacaccatcggatctgtccataagattcatcccaggtttggcaaatgggtattctgaacaacagtaccccagttctttgaaaaatggattggcaccacagggcctgtatacaaaatttcgtctgttcaggggcatatcttcaggtttttcgaatttctcttgtccatcagagatctcatgggtctcttggaaaatgggccatgggggcctcaactggttgtcagacggaccataagcaatatcttgagactggtaaggaagtataccaatcttcatgattctcaattgatctagttaggtctccacatgagttcttaaatgggttaaaagtgattaagtattggcaaaagtgtcaagaggccttcgcgagatgggatgatttaccttcaataaagtttaaaaactattatattgtaggtaaagaattgattgttagcttcaaaaggagcttttgcctggtcgtttcggtacttatgagtaggttagcttgaggaaggataaactattttacttatatctaccgctagggttacattattatgaagaggacgattaagcaagtggaaggtgaagaagaggtgtcgaggaaaaggccatcatccgtggttgttggtataacaaaatctatatcagcttgcaaaaggtgtcggactaagaagattaagtgtgatcatgagtttcctagttgcaagaaatgtgctcgagctaataaaccttgtgtctctttggatcccgcaacaggtagagatgtgccccggtcctatgtgatatttcttgaggatagattgacggctatgatgaataagttgagagaatgtggtgtagatccagagagggtgcagggaaatatccctatgactagtgaagataatccctgtgatattgagttatatgaagaaagattgagaaatgaacatcaagtaccgcatgataacttactggcggcttatctgatcaacaagggtacctctatgcagcaaggtgttggtatagctgatgatgaggaaacagcatctaacggtggtggttcccacatctcaccgcaatctggactgacgagatctgcagagttagacgaatctcataagagcataactgcgattggatctataaagaacaatgcctccaattcgtatttgggggactcatcgggtattcccttcgctaaattggtatttacagctgtgaattttagaccggattctgtagaagatgaatctgatgaggagattaaacagcgagagtcccaatatgtggattattccaatgcagaaactacatctgcattcgaaccactatggttaccacccagagaaatcgcagaaagtttcgtttctcagtattttactgattccaattctcaattgccagttctacatcgtgaatatttcctcaagaaatattttgaacccatttacggttcttggaacccatcagtatccttagcgtctgatcatacgaagattaacacttcttttaaacttccaagagattgtgaagatgtacaggatgaagaaccgtggtatgattcttggaaacgcagatacgatagagaggaaaatattacacttccagacaaatacgagataccatattttttcttaaacatggtatttgctattggtgagtcgactcaggtgctccgatcagatactgttagggtagtttcctttaaacggagagctcttcaattttctaaggcacttaatttctcacccaacagactggaatccctagcaggaactgtcctagttgctgtttactccttgatgaggcctaacgtaccgggtgtatggtatacaatgggatctgcactgaggctagctgttgatttgggtttacatgcagagaagcttaaccgaaactatgatccattcactagggaacttcgtagaagattgttttggtgtgtttattccttagaccgacagatatgctcgtattttggacgtccttttggtatcccagaggaaaacattactgcaagatacccgagtatgttggatgatgccctaattaccactactaatgatgatattgtggattattccaagatgaaaagctcaatggcgagccccaaagtcgttgccttagccatgtttaaagtgagaaggcttcaggcaaatatcgtgcaagtactgtatgcgcctaacggtgaagtgcctcgtagcttctctaatttggagtcatggaagtttgagatgcataggtcgttagataactggttccgcaaagaggttccaaaaacctacaagaagatgaatagtaaattcaatacggaatttttcaacctaaattattggttcaccaagagtatgttatatggtttgtcaccaaagattttaacgcttgatgactatgcatttgatgtagtctatgatagcactaggggttccatcgacgttttttacaaactatgccataactcaaagatcaattatacatgggtcacagttcatatgttgtttatgacatctatgacatatctttacagcatttattattcggatagaggcatacgagatggcagaaagatggcagaaaattatgtttcaaagctactctatgtcttgagaaagttaattgggacatgtgaagcagcaaagaactgctataatatttgcaaagttctatcggcggcaatgattaaactaaggttcgatgggaacaaaacagaagaaaatagcacgccacgttacccgcaggtaatgtcttccaactcatctcctgtagatattttggaaggtactttagatatgccaaaaatcaaacctgattccttcgacgttcccctggatcagttttttgacgaattagaaagggttactttacagtcggatcctgaatccactaggagtaagttttctagtcatgattctccgcagttgcccaacgtaaattacccttcacttgaagctgaagatggtgctgatgtggaaagggacaggtcagcaaatggtaaggatgggcaaagaattatagatatggttactcaggtcactacggactccatttggagtgaatttttcaacaaggcacgtagtagtaatgggtttactattaatgaggatgaattgaataaaggtgctagtaatttcccgctttaaatggttttgacttttcttttttagcttgtataagatgtaatattcttgaatctgagatacatttctcgtatatgtttatggtacatgttaaaaacatttctataataagaaattgtatgacaatttggccgagtggttaaggcgaaagattagaaatcttttgggctctgcccgcgcaggttcgaatcctgcagttgtcgcgattattttttttggtttccgattatatgttttgcacatcggaaaggtttttgaaggcttcacggtcaacaccagtgtcagttactcctagttgggatgaatgtgtcagtaaatcagagaaaataaaaaattgcaaaggacttataagcaaaaagtacattcaatacataaacgtagctatctaaataagacatttcacgtaattcaagctggtaaagcaagtctcttgaagcttggttcctctctgcaagcggtttggtgaatacccatcaatctctgagcttccaatgggtcagaaacttcttctggttccggccaggtcaagtattcgttagagtaattggaaacgtagtctggtggtagaatctccaatcttttaccgtaaccagtaacctttctccagtctctgtggacgttgtaaagagattcagagaagtaggcgtaacatctttgaaattgcttgaaattcaaagaattgttcaaggctggtttgaaatcgatgtattcattccaggccgcttcaggattttgcaaaacgtaatcagtagattttttgatggccttcaagaatttcttgaccttttcagggtttttcttcaagaattcgtcgttgcagatgtacaaaacagtacagaagcagcaacaacccaagcaagccaatttatcaattctcaacatcttggcttcagatgcagatctaccttgctccttcaaaaattcttccaattgcacttgttgcatacattcaataccaatacctgcatggatcttaccttcaatgatgtatttagcaacattcataccgcatctgacagcagtgtaatcattaggggtcataccgtagtgcttggtcagttcgtccaattggatcttaccaaattcaccaacgtatccaattttcttacctctcaatgattggaaatcttcagtaataccgctgtctggcaagtacaataaaccagtgaaaggttcatctaacaatgatgccacagaagtaactgggaaaccacgagccttggctgccaaggtgtgaatcatggcctttaatcccatgtccactttacctgatccaatcaattcagtaacatcagatgggttggatggctccaaaactgcaatatcaagaccttgttccttgaaataaccctttgtgagggccaaataaatgggaatatggtaaggagcagcttgccagtttaagcagaaagtaatcttttcggtggccatagtaattgatgattgatgattattggtgatgatctctgtgatgatctctgtgatgtcctatctatgtagcattagttgataacataaccccaactatcctcctcttttataccaattggataccccttgtatgctctattggttacagttggtttcaaaaccttcataattcttaagattgcaacttgtagttcaaggttccgttgattaattcaattaagggcgaaagtgatacatgttgttgtgagcgacccacaccgataaaaagaactgttaatgtttatagccccaggtctcgctgtttgattgaattgacaacctttagagcttttagcataagtcaaggtaaccctaatgagtcaattggtcgtggatctaaatgaacttgaaggattattaccgtcgaacggttctaggtttagagtcgtggctcaattgatagaattggaatacctcgaggggacttcaaaagtaatattaggaaacttgccagaatttagatattctgatgagggtaaaactcttaaagcaactattggaacatccgtctatgaatctacgtttcttcaaggtaaccgtgttcctcagaggggcgatgctgtaagtgtttggcttgtagtatatgcattaggggaagagaggtgctgggaagtattagaattgaagactattactaccaaggaattaaatcgattgagaatattctgggaatcatcttggggtcatgagtttagagctctttcaagttcatcgagaagagatgatgttgctgatcacaatgaaaaattgtgattgcaatgctgaggctaataatggataaacaaagaataatgattaagcatgtggtcaaaaggtttcagcacacatttcaaccgtatgaaactgtactggcaagactgctatccaagcccaatgaaaaattccatctttccaagccattgcaagcaggcgaagtgattaacacgggcaatggacccataaggcatgaagatgtcattggtaagccctataggtcattggttactagctcaacgtcaacttcccaccaatatatgctttgtaggccttcgctggaagagtatgtggttaataaaagaagagaagcccaaccgatatatccattagatgcaggattaatagtgcagcttagtgacgtgcatgcggatttccctgacatggaattgggaccatccatagatgtggagaagcctgctagtttccaaaggttgaacctatcggagagatatgatcgattcttgcatgacagatgggaaaacagaaagtctcaactgccacaaggtctacgcacatgtgccccacccaagcagtatttggaatgcggtacgggtcatggttcactaaccttgcaaatttgtaaagaaattcacagtgggaatgcttattacgacggtaatgattctacaagaggttccattttacattctcttgacagaaatgacaagcatttggcaacaggtgtcaggaatctaaaacactatgataggggtatctactggacagatgttgaattccaccttctgacagagtccgagcagggtccttcgcaatggttgcaaggtccagccgcatcttattatcgtgatgtagttggtcgcttagcgggtcgcccaggtgggttccttaacggtgcgtttctcgatctgccatcacctcaagaccatttggagaccattgctcaaaatctagtagctgaaagtccactgatagtctttgtgcccagtattactcagctgtgggattgtctctgccagataaagacagtagggatcccgctgtcaatgacaagagtcttggaactaatgccaggatcaggcggtggtggtatgcgcgaatgggacttaagaagaactgtgattagagagactggtaaggaaagtatggtggtaagacctaaagtcggtgctagagtggtcggtggtgggtttgtaggaatatttaaaaagctacccgctgactcagttgtcagaacatggagataaaattctcacctaaaaaaaattctaaatataatatacgcataatgtacatagaatggccctttacccgctagtaatagtagtagttgttgttggattaaaatgcaagcttcttttgattcctcttcttgttcttcaagacaatcttttgcttctccttttcttcttcttcctcttcgtcttcgtccacttccatatcttcttcttcctcctcttcttcgtcttcttcctctgctgcttctgccttctcttgttccttggccaatatctgtgccatttccacttccctgatccttagtagttctgggttgttttccactaattgtttgtctcttaggaaatcttgctcctcgttgcccttcattctgttcttgtagaaggctctttcacgtttctttctgatatcttcgatcttctccatggccttcaaagtcgtatccacaagctctctgttgtatctgacaggaacatttctacgttgggcaaaagttagggtggaatcaacagccaattccttaccagcagcttttctaaatgccttggtccacttcaacttacgtgggttacgacgctgcttgaaggccttatgacacttagaccgacagaatctaaactccttggcatcgttacgaacaaacatgataccatgcccagggtaaactggcgacgaacagaaatggcactgatggattctcatatcaaattacttggccttcttttcttactgaatttttgtattatgcgatgagatgagatgagatgagatgagatgagatgagcttctaatatctcgaaaatttttcaacatgggcaagctggaagaaaaaaaaaaaaaaaaaaaaaaaagcgatgatgatgctaatggtaaatacataaaaagagcaattcaatagaagaaaaggaagagaagactctaaatatctcgaaatggctagcgatccaagtagaaatgataacttagctggacttagcgcaccacaattgcctataccgggccaagacaattctagaatccatgaagatcaaaatgtagcattggaggcacccaagccaatggcaccatcacagaagcagggaatggacctctatttcgatcaagcactggaaaaaatgggtcagcaccctgtccttaccggtgttggaacgtttttcgctttatatgtggctgcaggagcttacaaatctataactagcaaagtacgtggtgagaaaggagcagcagcatttctaaaaggtggatttgacgccaagatgaaccaaaatgaggcactacagattttaaatttgaacgaaagtcagttgaataagagaaaactgaaggaagttcacagaagaattatgttggccaatcatcctgataaaggtggatcaccatatctagccacaaagattaatgaagccaaggactttctagagaaaaaggtattgaaatgatcgactgaatcccgtgtcacaatgcgtatcctgtaaatatttgatgataaattagtatcatactatatacataccattttgtaaaatggattcaccacagggacaatatttgccaatgtgagtaatgcgatgttgataacaatcgacgtgccaagacctggagcacgatgtacaacgtgtaccttgtaaggctaatctgtggcagttttcacaagttgagataccgttcgcgatcagatactcttctaattccactgaacatctaagatccattgatatacggccattttcatccttggcaaaccattttaatccgcataatttaaatagtaaagattcaatctcgatgggactccaatctttgtactggaaaaattccgatgactcgacactataagttatgcacttattccacgaaacatcgtttcgtatgcggtctacttctgttatgatgggacaatctattattacttcacaatctctagaaacacacattttctccacgcaccatttgataaattcaatttctctcgttgagaatctagtggctaatttactttcttcactagtaacggtattcacatacacgtaaaatctgttgttgcttggtaatccagtgtcctttaacatggaactaacgttgttcttacccatgccgtgaccaacccttgatattttatagcccaatggattcaatttcacattgattcccttaatgatttcaaccaatttatccgttgaacatacttgagaagtaggatcctgtgtatatttttgcagtttgtccaataccactaataacatattctcatggcagattcctctgcagtctagtaggtattgtaagaggtaccttgcaatgtcgtggtccgttatggatttatcggtttcaggaatgacagtacccgattcactgggttgtgctgtgttcccgttaggatcagtaaactctatatcctcagtcatgttatgctacaaccttcttgtattatttcaggtcgacatgagatgaggtgagataagatgaaatgattcaactttcaacgcgccagcatttaagaataatactacatagtgaaattgtaaaaatgttgaaatatttggaccaattatttgccaattggtttaagtggcttgaaaaatttgtagtaagacccaaaagtagaatcgaattcgaattagtagagtcctcttttcatacagatcgataaattttacgttttgtacttcaagagttagttttatgcctgagcgaacccgcaaggaaaccaaatgtgaaagcttttctataaacgaccttatgctgctcctagcaaaagtgaaatcaacatatttaatatatatttttgtttagactttgggaaggttctgtcaccaatactgtccttctgttagccaaagaacgtaacatgtctctctttctaagtggtgctttggctgagttagaagtcaacccattgtagtctgcggctgtgcacctattctcatggtcagatgcattcattcgagcgttgtaaagtgaagttgtcatcttcctcatattcagtttggcctgttgaatttcagtttctctatccttgtactgcttatccaatctttcatattcacattgcaacgtctgaattttattttctaactcttgtggtttctttctaaattttgaattggatctctctaacaattcaatagtctctatgtgttttttcacttgacagttcaaatcgttaatttggatctgatcaattcgtttaccatcttgtaaaacagcattcatatcttccaatttaccgacttcttcattgagttcacaaagggcatcatgggcggctttcctgtattgactcaattctttattttgatcatcgagattactatgaacctctttcaaattttgaaaactttcttgtagagtcctatactcttgtcttaaatgtactagagccttatcacaagctgtcttttcattctccaatttttcatatttggtaaaagtcactttatcttgcttcaattgtaattgtaaatccttaatgtcctttaacttttgttgaagatcagcacgcatattgttattatccacacgaagagattcattgtcctttagtaattcatcaaccttgtagttggcttgattcaaatttactataactttctccatttgagaagtttgatttacattttcccttaacatatcgttgatcttatttttgaaatatttcatgtcagatttggtgtctctatcatatttggccttaatattttctatttgagcctccaagaatttaatctttgcatttctttcctccattttcacattaaaatcagtgctatttatgatcaaattttcattgcgttcaagccatctctccctttctgatcgaagctcattattattctgcaatagttcagaattcttagattctaactcttgcttctctttgaaaagcttatcatagtcatcgcttaaactttcgttcttggaagtcaatgctgaaattttatcattcaattcaacgtttgttctatccacgtcagacaattgaagcacttttgcctctaaatttaatagtttagaagtcaattgatcattttttgaagtcaaatcagtattgactaaagcgagaccggtattttcctgttgaactttatcaaattgttctaatttgacaagtaatttttgtaaattctcgactcttttcgattcttgttgtagttttatacccaattcaacatttagctcacacaagcccaatctttcggtcttgaattgttccaccgaagctttcaaatcttccttctcttcaaaccacttgcgcttctcagcggctagcacatagttaaagcataattctttcatcttaaattcattggaaatcccaaacatcaatttaccgagggaatcaaacattttatcaatgtccaaataatccactgaaataccacacatattataacatttaatcataacttcttgacacgcatcgatataagggttagcatgtggtcgataaggtataacggttcttggattagtctttaagatggatttatttttagtatttttctgatccaaggccccatgctgagatgctggtttgtactcagcttctttcatgaccaatttaccaacttcctcattaatatcaaaagtaatcgtttcattctcaccaaatcgaagcttttccctctcttcagtttcattggcaaaatatgcttcatagggaatttttggatctggataaaatccatggtctctatggcttggcttactgaaatacagcatagcactattaattaatttattctgatttttaatttcatgaattggagtaatcagtggctccttgataagttcgtctcgactaggtttataatcccaataatcggcacgccgttctttaggaatcttgaaatgatctggtgtacgcatcttgcatcaacggtcggataagccactagaagagaggagctttaaatcaaatactcaactctcacacaacctctctaaatatacggtatattttattctattttactttattttatttatttatttacgtattttttttgttgattatcatatttatatgtctgacgcgcgacacactgacacaaaggacaacaataaaaaatcaaaagagaggaacgcaaaccaaaccggtaatgaaatagcccatacccataccccgtatagccagtataacaataacaataacaatagcgatgacaagaacgagattaataatagcatcatccccctttagacgtaaatcaaaattcaagggaaccatttgcacatggaaccaagatcgacatgcattcagcattaatagataagaaggaagcaacgtttgagtagttgatgaaacccgtttgttgtcaactcaatcagatcctaactcgacaaaagtccaaaatcgaaatgcaatatacgatcgtcgaattttactctacacgaaccatatctcctggatacttttcctctttttacagcggcttattcctgaaattttactgaaagtttttcaataagccgagtattatgctaagtatgccgttatactctgaattggtgcttcccatacagctgcacccaacattgggtgtggtaaactcgaagccaaaattcttattggaatggaataattccacataagttggcaaacatgttgtgcaactaagataaattgacgggcaaaagaggaacaaccaacttttcatgctgtataagagttgaaagaaagttgaagtaagatttgattcctttctgatatcctttctctcgtgtccggaatacaggggctgtcggacaaacactgtcgctctacaacagacctcaaatagggttcactgtctgcgcctcttagggcttttcggacaaggaacccttttcaagtgaagcggacagatcatagtccggggaatattttcttccttaaaaaaaacttcaacttttggtgtagcataacaagtgccaaggaacgatcagaaatagtagtttagaatcaacctaaactatcattaaataaagtaccgagcaaggtcctaaaagaagtggaatctgagggtgttcaaggtctgcgaccccatttgttttcatcgctggtagtgtaaaacatttgatactattattcaatattcaaggacaaaaaacacgtttacactctcccaaagtaacaacagttgttttggcttacggtttaaaaattaatcagtaatatagttacaagttttgtttgaggatagaagaaagtcgatttccgcggtttgtcttctgtagagttccattcctttatttccctctacaacgagtacacattaacactctaatcccttccttattgcaaagacaagaacaagaacgagaacaaaaacaagtacaagaataaaacgaacagcgaaggacaaggctctattcgtttctttttactttactcatgtcagaaagtagtaccttaaaattacgccccacttcgccgctaagtgttaatagaaatgttgcactaaattctgcattgtcatggaaaatatggttaagattagaggattatgaagaatcgatcaatcaggcattttccttacagttcggtgaattggatacgattgatgatttaaagacaaaaatttttgaaaatctaaatacaattagatggtcaagagttaatgataatgcatcaattgcgctggggttttactgtaataggactgactgggaacccgatagattttctccgatacaaagattaccgactagtccagtaaatacactatttggtaaaagtaaacctttacaacaacctagtgccgcatctaccaaaagaagtttcgcagataatgattcgaaaagtggtagtttaaatacaagtcccaggatatctgcgtctgggagtccaaaattatcagcagttcctcgattgcctaccgcccgttatggaccaaatataggttcacctttcttaagcgtccaaaatggtggtgtaaataacaatggtggcagtaatggtgttggaagtactggtttggcaagattacctggcggtgttgccccgacactatcacctctaccgtttagtggtggtagacttgcattaacaagttggtcaaagaaagatctaaaacacagtgtagagcctgttggtgattcattatatcgaattctatttgaacccgatgaattggtgttgaccatttataacgaattatttggacacttggggtctcaagcggcctcagatgctttacttgtattttgcaacgatattataccaaagcatgaaatgcttccagcaagtgcaatggatggtccaaattttgcttcgaatcaactcacgcaagaattactcaattcacaaaataggaaaagggaacaagaaggtcttcgattggatacacgagatccacatgacttgttacaaccgggattagagactccaccaacaatcggtgctctaaatcctggagatgcaccaccagaactagtgttagatgatacagcagcacagttggctcgtgaagagagtgaacgtgaattccaactaattactaatgaagaacaattacgcaaagtttctcaaagcatgctagatgaggataatcctgattcaccaaagcaagcaatcctattgctcccgaaaaattttgatggtgatgtgaattttaatgaaagcccttccaaaatgtcgtcgagaccatcatccccactaacaactgttggtgatactagtaatgaaaatacggattccaacattaatattggaggtttcaatggcgacaacaataatattaatgctaatatcaataccaatacgcataattataagaataacgacaacaacaataacagtcaagaatcacaattatcaatgcccctagttgacagaccaaggacagacgatagtttaatgcaatcccatgcgccattgattgaaaaggaagttggtatggttcatcctttattagaaaatgatcgtaagaaagggttatctagtccgacatcacctttactccctcgaaacccaccacccaatttcaacagactatcgcgaagttttgcccctaagaatgggtcttcaagagaaaagccatttcccggtgaatggtccgccactagcgataaagtctttcctaagataaacgttttaattgtagaggataatgtcattaaccaaaccattttaagttcttttttgagaaaacacaaaattttctacaaagtggctaaaaatggtcaagaggcaatagatgtttggagagaaggtggaattcatttaatctttatggacctacagctgccagttctatctggtatagacgcagctaaaaagattagagaattggaaagagagcatggaattggaatccaaaagagcaggaaaactcctcatattgaatcgaataaaatcaataaagatcaaatcaacgctcccgtaatcattgtagcatttaccgcttctaaatctcaaagtgataaaaaagaagctctcatctccggttgtaacgattatctgaccaaacctgttaatttgcattggttgagcaataaaatcaacgaatggggatgtatgcaagcattaattaactttgacagttggaaggagggacaaagtagaatgacagataatgtcttggttaaagccccctctcaaagatccgtgaaagcggtatctgggaatccagatatcaaatatagaatgaatcgaagaagaagtcgaagttcaagtacttcttcccaatccaaaatttcagaggcattacgtttagcaccataagaaaattaataattttcctaactatgcttttctttttgtttttcaaattatgggttctatttcattgcttaaaactataaagtatttctctaagcctatgccccgagttcctctatttcccacgatttcttcttctacgtctataactactattttgtaactattaaacatacatacccgtatttataaaatggctgatcttttcttattcacgttatggttggtttagattcacaaccggggcaattatgcaaaatttcatgaataaagacatcacaatcaatgcaaaaatctttgagacagtcttcacatctatacctagaactggttagaagttcaccggttttatgatttttaacggtagggaatctcacttgacaactgaaacaattttccgttggaaatacttgtccagtaggtacttctgagaaagttttcaacggcattagatggtgataggatctcgctaaatgggtagacaatattaacattaaatcacaacaaggacaaaccatcggcagtgagcatactttactttggcagtttggacaaaaatatccaccatacaacagtttagaatggcatgcacaaaaggtgggcgcttcttcgaaaattctcgtaggaaagcccatcttaaccaacgtgaaacctttattgattttattaactggaagcggcgtcactgcctcagcaaataattctttacaatgaatctcatccagaggcactttgtaaaacgactcatcaccataattggttgccttacacaattctcgacaaatagcaacctgtgccgacagaccaataatctttacacgtataccttcttgcactagtgatccaatcgttagatgaatatcaccagggtctgtactcgacagtgaaccaaagactataagaacttccttagtacaatgaggcggcaccggcaacagcaacccccttgtcatttctaatgcattctgtaaagatggattaccttttggctcctgcttcctaattgatttcaaagcgtctacatgatcctgtgggttaccactaacttgactaatcatatgtgccaagccattacgcatgctaacgataccaatctgtgaaataggattttgatcaaaaaattcatgaacgaaatcaatagagtactggaccaacatggcatgcctattaggtctcatgtccttttctaacatcgcttcactacaatccaatacaagtattaacgttctaataatacctctttgatacggactaatatttttttgtgcagtccttttctttctggactctactatgctagccgctaatgctgccatatcaccttcatcatcagctggcactaaatcccaacttctcttaatctcgtcttcccatgcataaccaccgcttgcaccttgtaatgccttattagacgtcttattccttcttgcacttctaccattacgttttggatctttactagctttcccattacgatctttagggtttgatgaagatttagatccactttttacgtcgccttcatcatcatcattatcattctcttcgtcttggtctaattccctcttgtgtcttctagtttccttggaggaaacttgaacttgttcctcgtcttcatcagattcaggatcgattactggcggcatcttgaatcaacctcttgcaaggttattcaccattcgatgggaatcaatcctttgtttgaatgtctaaaatcatattgggttgaacttcattgataattttgaaagttaaccctaactttctgccctaatttataaaccatattaaatatttaaatatccagagatgggtataatgcaagcaatcaaattcttggcgataatagcaaaagttagccctgggaaagaactggataaatgggatcaaatggcaaaagtatacgaatatttaactggggaagagaataatagtccttctaataataaatcttttgacggtaagcactgtttagactgttaccaggcttgctttgaaccactttccattggaaacagctactgatggtgcctgggagtacttatttcctgtggagtagtttttctaactaagtttgttgcattttggtcaaagataatctataaggacagtaatcaggaaaaaaaaaaaaaaaaaagaaataaggtttagaattgacggtcctaagtttaattaaaattcttacgtgtatgaactcactccttattgacggtcctaagtttgattaaaaatccttaggtgtatgaactcacccctgtaattacccgaggagagtttctttgatagccagccccagattgacgtccattgcatttggcggtgattttctgttcctccaaagattatatcattccaatgaagcttcaaagttggacgtacttgacagaataaatttctgtctattataataactaccgttccagatgtgaacttggggcaatgggaccaaacagctatgaaaatgaattagagagacacaatatagaaacaccagtatcggaggtagacgtgatagttttttcgatggaaaccaatgctctcacttttttgaaaaagattttaaacctcttgtttccaataaggatgtggttggaccaagaagttactcgagccgcttttctctggtcagttgttacttcaccatgacctggattgtattgctgcggatgtgttcagagcgtgcgatcctccttctgattagatcgatgttgcctttaaacataaagaatttaccggctaacgactacctctcgattctctgtcaaaaaaactttgctttggtcgtggatattcagacattgattcgagaagttttgagcaaaaaatagaaccacgaccagaaacgagggtttttgactgtcacagcacagaagcctacaatagacatcgaagaagggactagctcttaatgtgctttttatcccttatgaaaacatgccattaagcggtagcgaatgaatgaaaaatgccccatacaatcatcgagataatgaaggtcagcagcaaaatcaaaaaggaccctaattctattacccaaaagtaaagaattgaggtgttgaaaatattgcgaaacctctcgaaagtaccatctctaaattcatctctttcagccgtatgtgataattcaccaaagttctcaacgctcttgttgtatttcgcaagtgctctctcagttagcgccttatttgatggatttttccaaaaattgctgtacatttctccttcgcaataacatctgatgtcgtaggtctggcattctattggttttacgatttctctcacaaaaaagcgcatacaatgctccccactgtaaaaaagagaataacgatatcctgtctcttcagaaaagtgattaactctcgatgcaattctcctccaagctactggatccccggttaggtccaccccagccacttccttcaataacttttggagcgcttttgtctcaatattaacctttttcctatggtgaataaagttcaaaaaagaaaaagtaaagcataggaaataatgactgatcgtccataagggagaaaattcgactgaaagttctgattcgagtggattatgataaaagtctcgcaaactaatgtacactaatagtacagccgatgaaataaatgcacctgaaagagaaacaataatgtcgtatatccatgttttctcgaaaaaatatggggcaaggaagtataccaactttccactagtactgtcctctggcaattctatttcctcctcttcatacatctgcacacacttctctaagtccatttcaccttcgtaacttatcatactcatcttactgcgttggttaaatacacctttgctgtcgtgagtgtctgaattaccgccctttatatatttttcaccccggaccttcaccccggaccttcacccccttgattgttccctccccgcggagcaattccatgcagaagaaactcgaaagcggtagagaggtattttgaagctcaattctggaaaccctaatcagagctctgaaaaagtgccttatgtgtagtgcatcggcaccttatgtcacttttgcgtgacctttttgccaggaatatctttttcctatatatttccactttcaagcgagaaggacatcagtatatgtataggtaacataaactttgttcggacttgcatggattgttatctattgttatcaggaatttctttttttgtaatcctccccatttcgctcctccgatgacgataaaaattcaatctcgtttctcatagcaacccaggaaagtactcactacatacaacgaaggagtttaaacaagaacaaacatggaatccgataaagaatctcaaaggcctgttttaccacagggcctctttagaaatgagttgacatgtatgttttatgaaatgtctaaacattgcttcccctgggtggtctcatgtttatgccttgtcgctggatgggtagtagtagctcagaaaaatttcattcatgaagtgtgcctgtgggtgccatagctagcagttcttctggatctttgcatttttatttgctatttgaaatgctattccaatacaacagagttagttcagcgaatgttggaattgaatcctggtgatgatatcgagaaatgggaccaaatagccaggtatatgaatcaatatctatctaaggaatataaacatcttcctaataatagattttttgacggtaagcactgtttagactgttaccaggcttgctttgagcctctatccgttggtagcagtccttcggaatactgcgagttaaaagaaaattttgagtttacacaaccaagtgtagaataagaagaacgacgaatatagtgatttttactcttaacctgagagtggcagtatatatctcaaaacatgttggtatcacacgcactgctaccgatgatctctgggagcattcaattcctctgaggtagttctcctaactaagtttgttgccttttggtcaaagataatctataaggacagtaatcaggaaaaaaaaaagaaataaggtttagaattgacggtcctaagtttaattaaaattcttacgtgtatgaactcacccctgtaattacttgtggagagtttctttgatagccagccccagattgacgtccattgcatttggcggtgattttatgttcctccaaagattatatcattccaatgaagcttccaaaggtagacgtaattgacagagtaaattcctgtctattataagaactaccgttccagatgtgaacttggggcaatgggaccaaacagctatgaaaatgaattagagagacacaatatagaaacaccagtagcggaggtagacgttatagttttttcgttggaaaccaatgtcttgacttttttgaaaaagcgctcaaacctcttgtttccgataaggatgtggttggaccaagaagttactcgaaccgcttttctcgggccaattgtcactttaccatggcctggactgtattgctgcggatgcgctcagagcgtgcgaaactccttctgattagatcaatgttgcctttaaacataaagaatttaccggctaacgactacctctcgattctctgtcaaaaaaactttgctttggtcgtagatattcagacattgattcgagaagtttttagcaaaaaatagaaccaccaccggaaacgagggtttttgactgtcacagcacagaagcccagaagagactagctcttaatgtgctttttatcccttatgaaaacatgctattaagcggtagcgaatgaatgaaaaatgccccatacaatcatcgagataatgaaggtcagtatcataatcataaaggacgcaaattctattacccccaaataaagcattgagatgttgaaaatgttgcgaaacttctcaaaaatatcatccctacattcatctttttctgcaatatgtgacaactcaccaaagtttttaacgttcttgttataatttgcaactgctctctcaactagcgccttatttgatggatttttccaaaaattcctgtacatcttcccctcgcaataatatctgatgtcgtaggtctgacgctctattggttttacgatttctctcacgaaaaagcgcatacaatgctccccactgtaaaaaagagaataacgatattctgtcccttcagaaaagtggttaactctagatgcaattctctgccaagctactggatccccggtcaggtccacctcagccacttccttcaataacttttggagcacttttgtctcaatcttaacctttttcctatcgtcgatgaagctaaaaatagaaaaagtaaagcataggaggtaatgaatgatcatccataagggagataaaaagtctgaaagttctgattctagtggatcatgataaaagtctcgcagactaaagtacactaacggtgcagccgatgacataaatgcagctgaaagggaagcgagaatgttggatatccatgttttctcgaagaaatatggggcaaggaagtatgtcaactttccaccagaactgtcctctggcaattgtatttcttcctcttcaaacgtctgcacacacttttctaaatccatttcactctcgtaacttatcacactcatcttactgcgttggttcaatacacctttgctgtcgtgagtgtcagtttgtgtctaaattgccgccctttatatatttttcaccccggaccttcaccctggaccttcaccccttcattgtttcctccccgcggggcaattccatgcaggagaaactcgaagtgtcaaaatgataaaatatatatactaaagcggtagacaggtagttcaaagatcagtttggaaaccctaatcagagctctgaaaaagtgccttatgtctgatgtgtcggcactttatttcacttttgcgtgacctttttgccaggaatatctttttcctatatatttccactttcaagcaagaaggacatcagaaaggtgtatatgtataggtaacatgaactttgttcggacctgcatggattgttatctattgttatcaggaatttctttttttgtaatcctccccatttcgctcctccgatgacgataaaaatcagatctcgtttctcatagcaactcagaaaagtacttgcaatatggaacgacagaggtttatcaagcacaaacattcaataaagaatctcaaaagcctgtcttacccaaacaactcttcaagagtaattttacatggttcctttatgaaatatccaagcatcgtttcccctaggtgatctcatgtttataccctgtcgttggatgggtagtagttcgggcgagtgttattgaccaaaatatgcttgtcagtgccatgattaccggtgctttctttacatttccacttgtattgtcctttgtatggttcagctattcgaaattgcaccccaagaatatgacaggattggttcagcaagtgttggaatcgaatcctggtcttgatatcgtgaaatgggacgaaattgcgaatagattgaactctttcttttaccaagagcatatctggaacacgcctcactctttttatgatggtcaacatgttcaacgtgtgttcaaggataatgttttaaagccatatctcgaagggaaatttgaagatattaccgatgccgacaagactcaatcagcaaggtgttatttgcaatcactaaaggagaagtttgaattattattgaaggacaatttgccggaattttttctaaattctgaattacccagagacactcacagaaacaaattcttctcttaccgaggatatttgttcatgagattcttagtttgttggtatcagtttgtgactttgttaaaaatcgtaactgcatttaacctaaaatccttctttcctttggttgatatcatatattgccagtatatgtcctgaatattccaacggattcgccatagctgggcatatccaaagatgaatacaatgcatgcaatcaagtttttggcgaaaataacaaaagttagttctagaaaagaaccggctaaatgggaccaaatagccgggtatatgaatcaatatctaactgaggaaaataacggccattctgggaatatatttctcgacggcaagcattgtttaaactgttacaagacctgctttgagcctctatccgttaataatggtcctttgaaatactgcgatttgaaaggaattgttgaggttacgcaaccaagcgtaaatggagagaccaattaatgaagcaatgtattccttcctcgcaaactgaaagtagcagtatatactgatttaaaatataatggtgtcgcaagtgctgcgatagacagtctccgagtgtcatgaagctacctgatgtaacctcaagctggtaataaacatattttaatgtgttttggtgtcacttacaataatattattatatgatgaggtcttagctccaatcaaggtctgggatgtagcttaatgaaaagaacaattctctgaatatttcaatcgtgatatgtaccttctccactttctggtagcatatatagcgtctcgtaccttgaaacattcattaaaatctttttagggacttggtataaaaagaatttccatatgatactcaatattatatggatctacaatagatgtttctgtcaattttccctttcgcaaccataactattttttttttttttttttttttacttcatatggtctgcaacttctgagaaaggaccaatatattattggagcctagaaacttatcatttcaagtcattctgcttcgatgaggtgccataaaaattattttaaatatcagaattttgccagtttttttaccttcgattgaacaatcacagttcgtattcttcttacctcactcaacccttcacctatcgaattgatcacctacgagaacaggaaactttttaacagtagttcatttacctcaaactccataagagctgctgttgcccgcttttcgaaaagtaattaccaccagtgtaagtttctcctgttacacaagtacttcgactgccttttaatgtgctttttatcccttataaaaacatgccattaagcggtagcgaatgaatgaaaaatgccccatacaatcatcgagataatgaaggtcagcagcaaaataaaaaaggacgcaaattctattacccccaaataaagcattgaagtgttgaaaatgttacaaaacctctcgaaaataccctctctaaattcatctctttcagccgtatgtgataattcaccaaaattctcaacgctcttgttgtatttcgcaagtgctctctcagttagggccttatttgatggatttttccaaaaattgctgtacatttctccttcgcaataacatcggatgtcgtaggtctggcattctattggttttacgatttctctcacgaaaaagcgcatacaatgctccccactgtaaaaaagagaataacgatatcctgtcccttcagaaaagtggttaactctagatgcaattctctgccaagctactggatccccggtcaggtccacctcagccacttccttcaataacttttggagcacttttgtctcaatcttaacctttttcctatcgttgatgaagccaaaaatagaaaaagtaaagcataggaaataatgactgatcgtccataagggacaaaattcgactgaaagttctgattcgagtggatcatgataaaagtctcgcaaactaaagtacacaaatactgcaaccgatgaaaaaaatgcacctgaaagagaaacaataatgtcgtatatccatgttttctcgaaaaaatatggggcaaggaagtataccaactttccactagtactgtcctctggcaattctatttcctcctcttcatacatctgcacacacttctctaagtccatttcaccttcgtaacttatcatactcatcttactgcgttggttaaatacacctttgctgtcgtgagtgtctgaattaccgccctttatatatttttcaccccggaccttcaccccggaccttcacccccttgattgttccctccccgcggagcaattccatgcagaagaaactcgaaagcggtagagaggtattttgaagctcaattctggaaaccctaatcagagctctgaaaaagtgccttatgtgtagtgcatcggcaccttatgtcacttttgcgtgacctttttgccaggaatatctttttcctatatatttccactttcaagcgagaaggacatcagtatatgtataggtaacataaactttgttcggacttgcatggattgttatctattgttatcaggaatttctttttttgtaatcctccccatttcgctcctccgatgacgataaaaattcaatctcgtttctcatagcaacccaggaaagtactcactacatacaacgaaggagtttaaacaagaacaaacatggaatccgataaagaatctcaaaggcctgttttaccacagggcctctttagaaatgagttgacatgtatgttttatgaaatgtctaaacattgcctcccctgggtggtctcatgtttatgccttgtcgctggatgggtagtagtagctcagaaaaatttcattcatgaagtgtgcctgtgggtgccatagctagtagttcttctggatctttgaatttttatttgctatttgaaatgctattccaatacaacagagttagttcagcgaatgttggaattgaatcctggtgatgatattgagaaatgggaccaaatagccaggtatatgaatcaatagttatctgaggaatataaacatcttcctaataataaattttttgacggtaagcactgtttagactgttaccaggcttgctttgagcctctatccgttggttgctaccagatgtgaactgggggcaatgggaccaaacagctatgaaaatgaatcagagagacacaaaatagaaacaccagtagcggaggtagacgtgatagttttttcgttggaaaccaatgttttgacttttttgaaaaagcgctcaaacctcttgtttccgataaggatgtggttggaccaagaagttacttgagccgcttgtctctggtcagttgttacttcaccatgacctggattgtattgctgcggatgtgttcagagcgtgcgatcctccttctgattagatcaatgttgccttaaaacataaagaatttaccggctaacgactacctctcgattcactgtcaaaaaaactttgctttggtcgtggatattcagacattgatgcgagaagttttgagcaaaaaataaaaccatcaccggaaacgagggtttttgactgtcacagcacagaatcccagaagagactagctcttaatgtgctttttatcccttatgaaaacatgctattaagcggtagcgaatgaatgaaaaatggcccatacaatcatcgagataatgaaggtcagcagcaaaatcaaaaaggaccctaattctattacccaaaagtaaagaattgaggtgttgaaaatattgcgaaacctctcgaaaataccatctctaaattcatctctttcagccgtatgtgataattcaccaaagttctcaacgctcttgttatatttcgcaagtgctctctcagttagggccttatttggtggatttttccaaaaattgctgcatatttctccttcgtaataactcctgatgtcgtaggtctgacactctattggttttacgatttgtctcacaaaaaagcgcatacaatgctccccactgtaaaaaagagaataacgataacctgtctcttcagaaaagtgattaactctagatgcaattctgcgccaagctactggatcctcggttaagtccacctcagccacttccttcaataacttttggagcacttttgtctcaatattaaccttttctctaccgtcgatgaagctaaaaatagaaaaagtaaagcataggaggtaatgactgatcgtccataagggacaaaattcatctgaaagttctgattcgagtggattatgataaaagtctcgcagactaaagtacactaataccgcagccgatgaaataaatgcacctgaaagagaaaaaatgatgtcttctatccatgttttctcgaaaaaatatggggcaaggaagtatgtcaactttccaccagaactgtcctctggcaattctatttcctcctcttcacacgtctgttcacacttttctaaatccatctcgctttcgtcgcttatcatactcatattgtcttgttggttaaatacaccattgctgtcgtgagtgtcagcttgtgtctgaattaccgccctttatatatttttcaccccggaccttcaccccggaccttcaccccttcattgtttcctccccgcggggcaattccatgcagaagaaactcgaaagcggtagagaggtattttgaagctcaattctggaaaccctaatcaaagctctgaaaaagtgccttatgtgtagtgcatcggtaccttatgtcacttttgcgtggcctttttgccaggaatatctctttcttatatatttccactttcaagcgagaaggacattagaaaggtgtatatgtacaggtaacataaactttgttcggacttgcatggattgttatccattgttatcaggaatttctttttctgtaatcctccccatttcgctccgatgacaataaaaattcaatctcgtttctcatagcaacccaggaaagtactcactacatacaacgaaggagtttaaacaagaacaaacatggaatccgataaagaatctgaaaggcctgttttaccacagggtctctttagaaatgaattgacatgtatgttttatgaaatgtctaaacatcgcttccccagtgtggtctcatgtacattctgcgtcatcgcctgggtagcattttcaatggatgcttcttatcaaaatgtccctgtattctacatgattgaccgtgttgttttcgattttgcaatttgctttcccttagatggctctattattcgaaatcgcatcccaatgcgacattgttggttcagtaagtactggaactggatcccggagtggatatcaaaaaatgggatgaaattgaaaatagaccaaatcattgcctttatcaagaaaatatctggaacacaccttactttttttctaatggtaaacaggttcaacttgcattcagggatgatgttttaaggccatatcttgtaaggagatttgaaggtgttgctgacgtggacaagatccaatcagcaaggttttacctacaatcagtaaatgaaaaatttaaattatcattaaaggacaatttgtcagaatcctttctaaattctgaactacccagggacacctacataaacaaatctacgcttcactcgcgatatttgttcatgggaatcatattttcgcagcttcaatctcacattttcttggtgatcgtaatgggatttattcggaaattattatttacgttgttttgttgcatattttgggatcgaattttctcaaggaaccattggagcttctattgggtggtatatccagagatgggtataatgaaaacaatgaaatttttggcgataataacaaaagttaacttctgagaaaggaccaatatattattggagcctagaaaattatcatttcaagttattctgcttcgatgaggtgccataaaaattattttgaatatcagaattttaccagtttttttaccttcaattgaacaatcacagttcttgttcttcttaccttactcaacccctcacctatcgaattggtcacttacgagaacaggaaactttttaacagtagttcatttacctcaaactccataagagctgctgttgcccgcttttcgaaaagtaattaccaccagtgtaagtttctcctgttacacaagtacttcgactgccttttaatgtgctttttatcccttatgaaaacatgctattaagcggtagcgaatgaatgaaaaatggcccatacaatcgtcgagataatgaaggtcagcagcaaaataaaaatggacgcaaattctattacccccaaataaagcattgaagtgttgaaaatgttacaaaacctctcgaaagtaccatctctaaattcatctctttcagccgtatgtgataattcaccaaagttctcaacgctcttgttgtatttcgcaagtgctctctcagttagcgccttatttgatggatttttccaaaaattgctgtacatttctccttcgcaataacatctgatgtcgtaggtctggcattctattggttttacgatttctctcacaaaaaagtgcatacaatgctccccactgtaaaaaagagaataacgataacctgtctcttcagaaaagtgattaactctcgatgcaattctctgccaagctactggatcctcggttaggtccaccccagccacttccctcaataacttttggagcacttttgtctcaatattaaccgttttcctatcgttgatgaagctaaaaatagaaaaagtaaagcataggaaataatgactgatcgtccataagggacaaaaatcgactgaaagttctgattcgagtggattatgataaaagtctcgcaaactaaagtacacaaatactgcaaccgatgaaaaaaatgcacctgaaagagaaaatagaatgtcttctatccatgttttctcgaaaaaatatggggcaaggaagtataccaactttccactagtactgtcctctggcaattctatttcctcctcttcatacatctgcacacacttctctaaatccatctcgctttcgtcgcttatcatactcatattgtcttgttggttaaatacaccattgctgtcgtgagtgtcagcttgtgtctgaattgccgccttttatatatttttcaccccagactgttccgccccttaattgtttcttccccgcgcgacaattccatgcaggagaaactcgaaagcgtcaaactgataaaattgacacaaagaggtggacaggtagtttaaaggtcaatttggaaactctttaattaattactttgtggcatagaatgtcctaactgctataaattgtcagaggaaaccaaaatgatattaaccgaatgaagaaggacggccccagaaaattggcatgtccaacaaaaagaagagtaagagtaaggccagcgagagccacaagcgtggtggaagagagaacagtcctcgtggacaacacaactctctctctccacaaagagacaacagtatctctgatcagcaaggaagcgagaacagcggtactggctctggaacaaacgggatcaaattagccgctcgcttgtttcgcaatccattgttttccaaaagagggctcaaacatgcaaaagagggattaagaattaagagttcagataaatcaataagcaaactaaggtgtataggcagcggatttctcttcctttacccgtttcttttgataggatactgtatcgccggtttcctagctggggacatcaatagcaaacatgcctttttgtatggcattccattatgcattgctgttccttatttcatacgatgcttggatgatgtggatacattgctttcaagcatatttgagattggggagaagagtttgctcggatatttcgcagacccggtaattagagagttcctcttaactgtttttgagattgtcggacacatttataaatgcattgagggtactcaaaagtctcgaatctacatatggagaattctcagttttatttgttatctcctaggaaatatttgtctaatcatgaaaagaagggaaaagccagaatcgatagtgggtaattcgacgtgagtttcaaattcacaccttgccataaaatcctgattgtatgagcacgcgactgtacgacggaagtgagcttacattaccgccggtttatcatctgtgggtcatgttcgggtgtaaacgctagtcagttgtcgctaaataggttatatataaccatagagttgaataaatccatgagttaccaatggaagtgcgcaggacgtcagttcggcaacagacacaagtctcaagaagctgtcgaagcttccgatgtcaagtgggaacgacataaagtttttcaccaacggttcagttagcatgacggttgcaaagtgccctcaatgtggtaggatatgagctatttctcattgagctagtgtcctgggaagggttgaggaagtgcctaaaagccccttgtgttacctttataaaatcttttcataccggcatattatcaatttatatcatgaaataattccttgagataagactgcatcacaataatgttcgaacccttttaagtgactgtattggtcataagaatgtactatattcatatgcacatatacttgtgtatattctaaagtccgaggcttccactttgacctgccaaaagtgcgttatgttttttccttatattgtagtattttgaaaaaaaataaactgaaggggccataactctgaatatgtaccacgctaattctagagaagtcatcacccaaaacctcaaatttcaggattttacgacaccatatagcgtcgcatcgcatctcatatacgactactgtctttagccataccagcacaaaaatgcaaaaatacttgataagtgaaagtaaaatgaagaaagaaatccgaaacttattccattgaattttcctttaggagtttttgatgctttcaatgtaatgttcaaaaatcttctgtctgccaaatctgtgattcgaacccgtgtccattttgaaccgatgactttcaatcgtatagaattaattacccaaagagagaaccataattaggcacgtttctattacggcatttgaacaaatgccgttcagcaaccgaaatgactccatttttttcccagttatagttatcgtagatctactagtatatatgcgtcaatcaattatacataaatgtccgaaggtgtattctcattaaagaatacatcgaaagatactagccattgatatgaataaaacatcaccgccagaagctgaaaaaattgacgaacaagtagatatatcttccactaaggatgatagcacttttactagtggtgatgacgatgctgatatagcattgaaatttttgactcataaaaatgccaagagttacgtctcggaagaagatgaagaattaaatacaactgaaaagaatttttacggttcatcagcattacctcccaaattacttagaaaaatcgatgcttgtgttctaacattcttgtgctttgcctatctgttgatgttcttggataagacgttgttgaattatgcagcatcaatgggtattaaagaacatttgaaaggtaatgagttttccaatctgggaacaatattttacgcatcttacatctttatggagcccattgtcagttttttaattcaaagatatccattatccaaagtcatgggaactttcattacatgttggggaattgtcctggcatgccattgcgcctgtaaatcgtatacatccttgatgatcgtccgtactctattgggtgtgtttgaatcttcaagcgccgtcggttgtatcacaatcagtggtatgtactataccaaatccgagcaatgtgctagaatcggatattggacaagtcaagcgggaacaggttatatcgttggtggtctcatatcatttggattcttacattatcatggtaaagatttcacctcatggcaaatcatgtttttggttgtaggactctttacagtgctctttggactgctaactttggtaattctgcctgataatgtaaccaacgcctggttcctttcagaggaggaaaaaatccttgtagtgaagcacattaaagataaccaaactggattggagaataaaaaattcaaatggagccatattaaggagttatttttacacgataaactgacttggcccatgttagttatcaccgcatgttcacaaatgacaactggtgctattggaactttctctgtgacgatcactcaaactttcggatttgataaatatgttacagcattattacaactacccatcggtgccattacaattataattatgataatcaccactcagatgatgtccagatggggtcaaattaccctagtgaccacttccatgtacattcccaccatcattggttgcatagtaatgctatcactcccattatcccacaagatcggtaaccttttctccctgtacctgctctatagtggatcctctgtcattacaaacatctacgtttggaattctttgaatacttccggttacagtaaaaggatctttcgtaatgccgctacgctgatggtgtatagtttggcatacatcttagcacctcaaactttcagagaggccaattaccccggctatgtccctgctaagataacgctactagtgactcagtgcatttgtgtacctttgcaactgtacgtcggttatgtgtgtctaacagaaaacaaaaagagagataaagagcaggaaggtaaagatgtgggtaaatatgacttccgcgatttgactgacattcaaaataggaatttcaggtacatgtattaagtagtattttggtttcgtttatagatttgtatagtgttgaaatgatatgatagatgaagttgaaaaatttatgcccatctcatcttacctcatcgcattgatatataagatattcattgaatctacaaggcagaatctcaaaagggttaaattcaaggatgcccaatgctgatgatttagatgacggtcttgattacaactacgaatcagatccagaagctgaagaagtagctgtagaggatactggcgcagaggaaagtaaagattcacaagaagatgaaccagaggaaaaacctcatgatgatgataagaagagaaaagctggtgaatcttcagaacgtgaaggcagacctttgtccaaaagacaaaagaagttgcaaaattctaagttgaaggacaaaaaagaagaacaagtcaagtaccaattggacaaaaagaaaactataccaaaatcttctccagaggaaatcgttgagtatttagctacgttgattcgtgaaaagaatcccgatttgagtgggttggaactggatgaaatgtatttgaagaaatccgatttcctttccactgaaaaattccaggaagatcgtaatttgaccaacttgcccaattttatgtcacaattttctaagtccccaagaactatagttctatccttgactaatttgagaattgctgatatttacagaagtttaggcggtaataaagcttgtgtcaaattgttcgccaaaaacaaattgaaagatgatttagctacagtggaagaaatccttagcgccaaatctaagaaaaatgaacacataagatatttcattgcgaccccaacaaggttggaaaaattgattgagtccacagatctgtttttccaaggtaaggaaaaattggatatcttgctagacgcaagttatatggaccccaaggcaaacactttgctaaattgtgaaaacactacagttctttgcaagcttctcaagacttttttgaataagaagagttctgtaaaagtcttactttactaaacatccggttctgtaacattaaataaaattacattacaaattttaaaatggttttttcatcgacaatttccttactagcatagaaggtttcctgcttaaagtggaaggacctgcggaactcgattttctctttcctttgagttggttaactttttcggctggcttatcgtaatcattcatcattgtttttgtccttctaggagatgctacggagacatcatcactctggccaatggtctcccattctgggaccctttcgaatgcaccagaatttaagttggttgaaccgtcattgataacttttagattctccttattagggtttaagatgggactaggtaatagtcgtttagttctggtatttctgaaaacttgtgatactggctttaaatagatcgaagcgatggtcccaatattcaattccaattcctctaagatcactggatctagcttggtgctcaattggattgccggtagttcaccatcaatcaatttcgtcatagaatcgttggacagaagatgactctttggggactgagccagtgaaagtaatctccagtacatgaatgccctatccctcaaatcaggattgttaatctcttctgtacactgctttagggctttaatgcatattttttcagtttggtaattgggatttctgatgaagaatttgacactagaagttagaatggaaaactgtacgtctgaagtttcttccagtaggttagacgaaaatacttggaagaactctagatagttgggtaaagcgtatgaataattcgtgatgatccaaatcattgcatttttagcctctggctcttgaacagattcggtatgtttaaccaattcaccaataatggattcgaacctctttggatgttttctcaaaatgtttctaaacactgaaataatctcttgaaccacataatcaaccccgaattctaataaatctaaaagggcatccacacaatcatgagcggcttcttcgttcagtttaactgctaggttcccaatggctctgatagctttacgtgacatctggatatcaatatcggttgcatattgaaccaattcttctagaattcgcggtaaggtttcatgatccgctgaaagatacaaacattcaagctttgtatccttgatgtaaattgggtcattgtattcgataaaaaaaaatgaaacatccaatttcaacaatgatgcacccctgcttaacaaaagtaaaatgatatttcttagcactaaaaactccaactccggtggtttgtttaggagagatacgatcgaattggaaaatcttttgattagaccttcattcacatgctcagcatagttaagaaggtatgcgatgaatttgaaggcattcaatgccacataggtattggcatgttgtaattgaggtaggactaattcaatcattgcacaaacatctgaatgtgtctgcggtaccgccgaagtggtaagtgattctaataccatggctttatcccattcgttcaattgaggtaataaatctagcaaccccatagcaacatctagttctaatctcaatggctttaaatctgtgtttttttcgtgtatggcataaatagtatgcagagccgcaacttgcacagtgggacttgctaattgacgttcgaaaatgtcataaagagaatcaagcgtactagacactctatcatgatccaaatcatccatatactttaataataaaatagcggtcttgagaagattttgcggtacaccacgacgagctagtacatagccgacagctttgaaagcttcgttgatatactctaatgaagtaacggcagataatgttctcaagctcataatttgaacctcttcattcttattctccaagtcgcccaatactgcgcctagggcttccttggcgctctggggtttagctgctccaagagttctcacatattcatgacagattctcttgacctcaagatcatcctctacttgccaaaattttaacatttcaggatataataagaccatttcattatagttacccatctttaaattggcaattatcttcctcaaggcgactttcctcttagtagcactgactttagatcttttagcatcaaaattttgtaattctgctctaatctcagtagccttataacgggcaaatattctttgatctgacatgatgaatcttgatcctgatacttcacaaatggaccaaacgctctattgacaggaaacctttgttatggaacggagaaggcggattcagtctctaccactttctcaagcagccgatccagtgacttcagcaaacaaacgatgagccttggcaaacaactgacctagtgcttgattgtattctataatgagcatgttaacaattatgatcgaggcccctttcgtattcttttcttccagtacgcgccttgcaataatcacatgattcagggcattattagcgagaacttggcgtctaagttagcagatattaaatccactggatttcttcattgccacttcaacactgctaaccattagctattaaatttctcttttcttcccagctttttcgaagctaaacggatgtggtcaccaaaatagcacctttcaacggcctaagtagtttaaaattggtatctatgaaaagctctatttcacaggatttcgctcttaccaattttatctaatctaaatgtatcattatatcaatatttcctctctagaatgtatgtatgtgttttttggcggttaaagtagtaaaagaattaaggaaaaacaatctagcttaaactaaaacaagatacagagaaacaaaaggattaggaagaaataatacaagacaatgctgatttcctacttctcatttacagattagctctacatttgtctgccactccaattatgccgtgttttattcatggagaagtcttgagttaccgaagtacaactcataggcccattggttgaaggatcaagaactctagagaatacacaaggtagctgttaattgatttattgaattcatttgttttatctctaatgaagtctcagacaaaatttaatgtgttcctcttaagagacctcaattctgaacgattgctgaaccaataaggtaacatggtttgaagtgatcactcactcaacaagttgtcgattaaaaagaagattagatcaagtttcaaatatcctttcaaatccgcaagaggtgagaggtttcggatttttacttgggttcgactgacattagcattgtagaagcatgcatgtaacacacacatcattaggtaacgttggcttcaggtgttacttttgggactctatgatggaacccacctaaatctctataaaagagatggtcctttttacctcatcctagattcctagcatatgatgggccacattaatactgataactagaataatccactccagagaaagttttatcccatgtataagaccttcaattccattcgttcaatattgtttcttctttgcctagcatggcacacgttcgctaaagaaattaatggagtttcattttctggtctaaaattcactcctttgagttctttacactatccccatcaaggttggtctgcttcatttgatttcgaaatcgagaatggatcttccgtatctaaaggcgattactttactctcaatttccccactgtgtatcgtattaaatttgacgataacaaattgaccaccaatgctactttacaagacggttcagaagcatttgaatgttttgccgcgcaacaggccgcctataaaaatgaggatactgttttcaaatgtgtagccattcagggcctaagctcatattcctcattatcaggatctctttcttttggcttaagctttagcagtggtggttcttcttatgagtatgaaatgcaaaatgcagataaattccatagcggcactatgcaagtttcactcgcagatcaactttctgcttcagtagagtttgactccgcaaatttcaccaaagatatctataccattggacgtagcactacttttaatagcttagaaagttattatcttggtatgagctgtcccaatggatatttgctaggtggtactcaaacgatcaattacgatagagaaaacaaggggtatgatctggattgttcatcggttcaagtatatttatctgatcagttcaatgattggtcgctgcccctaaaaggtgacaacgcaaatgctaaagtagattgttctgatgacactttgaaagtaaatatgaacgaggccaagccgaatcagaagctttggataaatgccctgcaagatgtttctgccggtgtcaatactattcaacacgaggtgcatttacaatactcttgttctgatacggaacagaaaaccacatatagtacccagtttagtaccgtggttgaatatacaatttatcaggctagcgattcgggtactttgtccggtctaactgcgacttcagcctctagttcgtcgccggtagttacaaccccaacaattacgtccacgataactactggctggactggaacttataataccacgtactctaccggctcaacagaattgagcggtagcggcgatgttcccacagaagagattatttactatgtggaaacgccttcggagagtagcgttcctcagactaccactactactaccactaccggctggactgggacttataccacaacatattctactggctcaacagaactgagcggtagcactggtgcaccaacagaagagattatttactatgtggaaacgccttcggagagtagcgttcctcagactaccactactactaccactaccggctggactgggacttataccacaacatattctactggctcaacagaactgagcggtagcactggcgcaccaacagaagagattatttactatgtggaaacaccttcggagactgtcacccctcagactactactaccaccactaccaatatttggtcaggttcctacacaacaacgtactccactgaatctactagcctatatttcagcactggagtacccatggaagaggtaattatatatgtcgagacaccggaatctaaggttgccccctcttcttccactccacaaagtaaaacaactgtcacgagtaccacgacgaccggttggaccggaaagtacaactccacttattccactgcttccactattctagttggtagtactggaattccaacagaggaaattatctattattttgagacgccagaaactcaattattcaatacaagttcaacaccagccccatcgtcaagtacaactataggaatagtcacaactactaccacaaccaccactggatggacaggtacatacactaccacctatctcactgcgtcaacaagcctcggcggcaacactgggactttgacagaagagataatttattacgtggagactccaaatacaacagtattccctcctccctctacttccgttacatctaaagctaatataacttcctcaacatcacagatatcatccacatcatggtcttccaaggtgaatttgacgtcatcgacccctcaccttgtgactttatcaaccacagatttaaattccacgtacctcaccacttgcgattgttctgagtccgtcccaaccatcaactggtcctcttcgagtacttccaatactatcacttcggtgccgccgtcggaaacaagttacgttccgcaatcttcctcggctagcgtttcgaaatccagtctcaacattaccagcacttcttcgccatcagcatccattcagtccattagcaccttaccttcaccaacttcctctgatgttttcaactctacaatctcaccatctctcccagtgtcgtctttcagtactttaagtacctcgagtgctcagaattccattaattctacacatgtgacgacgacaactccaactgctgaaacattttttagcacaaccgccaactctaccggctcaaattacctcacctcttcaaggcctatcagcacgtcttcggttgaaaccaccagcgttacaaactctacgagtgtgccccctgccattacttcgaatcctattatcaccagtccttgggtcactgcaacggctaccacattacaatcaagaacagaggcttcttccacgagtgtcggcaatttttctagtactaccagtgctgcaacattgactccaacaactgaagcctcttctacaattatcgccgattcatcgacaacgcctgtcacttctgtggcaatcccatcttctacttcagcaacactttctacagactccgcaacgacatccacaagtcccataatcccaatagcagcttcctcttcatcgagttcaagctcttcttcagcaccttcctccggtttttcgtctgccgccgcggtttccactactccgtctcccagttcctctgggggccgtttctctctgggattgtcgttggatcagggctcaattgcacagataccaattgctcagtcatcaacaccttgctccacttccactaaaatttccactgctacagtaactgttaccaagaattccacaactacaaagcatgttacagcccctgtaacacataccgttactcagaaagttagcgactgccattgcccagtagaatctcatcagtcctcattggaaccatattttaataataactcttcggatacaggccctagcatagctccctatagtggtcaaggattagtcctaaagaggggcaacagtattacagctctcataggcgtgctgttattcatactttaaaaaaaataataaatggacttattaagattaagcgctcaaaattcatctgtgctgggagcgggttgccgcccaatagatttttcattttgcgtatacctactaaatgctgtggagttatttacatcgatgtttcgctgtctcatctctaataaattcctgaatgtaggctttaacacattcttggcaaggttctcggcttcatttacaaatagaatgtgttcaattgaccggtaagacttactgtgctaattacgtctcagttgtctcagctgcattcttggcagctaaaaccggagatgttactcaataaccttaggcaaatattgcaccaatgataaatagcgccaacgtataattatacaagtaagcaattgctgatcaacatcggtataaccttcgcttattcccgcggatatctgtatccaagacgtatcacgtgaccaaaagagatctaacgcgttgacgcgtaatttacccaatcaggtaactgcaggtaatttcgattcttcttgaggtaaaaaattcttcaaagcaaccgcgtgtcagattattaaaggaagaaccgttgaaagatttctacttcccaactggaactcacatcccaatccctcaaaggttgaagatcagaaacagcgttagagatcgttggttggaggccgatatcgatatcgatagattggtaatatcatggaaaagcccgtaaggaaaagaggtagaccaccgatcactaaggattatgcaaatcctttagaaagtcctatggcacattcttcattaaggatgcagagacaaggtgctcaagttttccaaaggccaactatgaaagtcggatctgtgacgccatcaccaaaaaatcgctcattttcaaattctggtattggtaatggtgctaataataatactatgggtaacaatagtggtagcaccttagtagagagcggatctcaacccggatcttctactaaaaaagcaagatatagaggtgttatattgtcaacacctaccaaatggcccgctggcgggaaaaatgataatggtactggttcaacggggacaccaacaccttcttctagtgatagcgttttttgttcagcttccaaattagctttgaaaagctcgccgccattatcgacttcgcctttgaaggatgaaaatgatgaaaatagtagtaataacatcaagaacaatttttcaactgcaaaaagggctggtcccaattttacaaattcatcatcatcacagcagttcaaattttcattgacaattggtgaaaatggtagagcttcaattgcaggttcatcatcacaggattcgacaccttgtaaatctaatgatcctcaacaacttaatagtgatggtcaagataatagggaagatcttggattacagacttttgagaaaagaaaagttttaacacttttaaagcaaatgcgtaatgatgccgcaccgccatcaccctcaaatactgtctcaagagttaagaaaccaaagcataatcataaaaagcagaattcgtatggtgaaacagaattgccgccaatattggaatcatgcgcgggtgtgaattctggcactaatgtaggtggtaaatctccaaaggctccaccagtttggactcaatccccgcaaccaccttcaacaccaaagacttcgttttcaatcagaactggttttactccaaatattggtatcgatcaagttcttttggatgtagttgcatctcccaagagtgcgggtcctacagaaaacccactaaactacggttatttatccaatatgatctcattatcaccaagaactaaatcgccagaatttcctcaacaagaacaatctcagcgacaatctcaacaagatcaccaagaatctcaacagcaacagcaacagcaacagcaacaacaacagcagcagcagcagcaacaacaaaaggatgaagaacaacagaaacaaaaacaacaaactcaacaacagttcgttttcaagttttcaggtgcagatccgctattgctcacggatgacgctgatggtaattggtcagagataatctataaccatttgcaaaattctccccgtcctcaaatctgcttcaatacaccaccatcatgggtaaactttggctcacccagagcagcaggttttacaccacaggcaagaagagattccacatctcaatccgccttagagaatgatccatcaaaatcaattaaagggctttctcaggtaaatcgtcgtgatagtattataaatttaagttcatctcccccacgtcgggagttgttcccagcctcgcctttaaggcgcccgtctttaccctatagtacaactttaacgccaagaattacaacaaacacgacaacagtagcgggtaatcataacgataaattggttcctgaaccatcaaccccgagaggccaagaagtacaattaccggcaatgatcgaatgtaccccactaatccaacagacaatgaatggttcattaactactaaatatctctccaacgttttatcaaataccgcaaatggtacaaatgccaatggtattaatgattgcggtgcattcgccgaggctgctttgccagttaaagatccaataagacatttatcttcaccaggaggagagcaagaggacgctagagctgccctaaagaaactcatcgcagagcgataattttccttttgcaaccaatgatagacattaatctctattttttcccccttctttctgcactacgaatcattttatttcttttatttacttcttagcgggacttatcgcggatgtaataattgtgtattcaatactttttcacataactatattttttcatattattcccaaagtggttcatcaaaattgtataaccaggataatccagcccatgaaccgataattcctaacgaacagtaaacgctgtaactcattagactaacgaattcaaatttctggaaaagaggatatctccatttcatcatatcaaggaattgaactccaagcaccaatggtaataatagatagatgtaaatcatagagagacgatctaaaaagaaaactctcctttcaacacttgatgataaaaaggttgtctttctcaatgcatagaaataaatcatacaccaaaccaatgtataaagacatttgagcaggaagtcttgattttcgtacaataatgggaataatgagacataacctgaagccgccaatagcatatacgaagtcaaaagccttctatcacaagccaccaaaaatgaaaatggtacaatagctaacatgatagccttttcatgaacgtgccaaccaaataagtaggacgctaatccgcaaagggtcagagaaccaataaatctcttgtacgaagggtcaaataagacagggatcactgccaagacttggtaaaatgccgttagggcaaatgtcaattttggtgtaatttgaggtaaaatcacgaagaagacgtcttgaaccaaacctttagtaccgttattattctgcgcaatacgctgtttaatctcatcaatagttgaaggaatcaatggaggttgaataaacttggaagtaaactgatgcacgtagggcaatttcaacatgactacagttaaaatcttatccaaaaatgaatacagagcccagaagttgggagcccaataggcatgagtcaatcccctagaaaagggaaataacctggtgagaacttgcggtaaatctttgacgaaaggtccaaaacaaagcgcaaatacaccaatgacaatactacccaactggaacaggtgtctccatttaacgatgaagattaaatctttatagcttttaaatttgaaatcttggaagttcaagcagtaagcccttagtaaaaagacaaaatagcatggcgccaaatataaaaagatgtgcttgaaacacagggccacagaatagaaagttgcacaccaaaggtatttaccgcgtttagccgccactatggatgcaatcaaaatggcaaagagaaatccattgtactggaaatgaatgtggtccacaattaggaaagctggcgagaggacaatgctagaagcaatgacaaagctttgcgtcctttcagtaacactactcgtgttaatgaaaacttgtaagacgacaaatagcaggatttcacttaatataacggtactcctttggaaaaccagcgttgaccaaccgaattgacccttatcgacaatttcaaggcatccatcttgcttcactgttccaggtacaaattgtgataaaaaccattcaaaatatgcgaaaaatggcggatagtcaagagtccattggctggtagcctcataataccattggcgcagtggtaaattatgagtaatggctaaccaattcctatgaacatcaaaatctgtactgaaataatcaggaatcaacagtattttcaataccaaagacgcaatccaaaaattccaaagggaaaaccgtcgtgtacccattgcagctaactgctcttgcttgttcaattgacgcccacttttcatcctatcagaccctcttggttggtactgcctgctttctatacttgggttaatcttgcttattgttactggcccttgttcaagagaaaaatcctcaagagtcgattgatatcaacaacacttcttaacaaacctttacccaaaataaaaataagaacaaaaaagaattgatttaaaaggagcttccaaatggattacgacgatgatttgaatgctccagtttgggatgacctaaatcccccaaaacaagcttcagttccagaattaagtgacacctttgctgacttgaatacagatgaagcgaaccagggagaagaagaagaggaagacgaaggtgttaacagtggcgaggagactcatactgctgaacatgagaattcagacaaccttctgaacacactggcacctcaagaggatccattggtggatttacagactgctaacgaagcatcgattctttcatcaccaacaaaaggtgctgacgatccgcttttctctgcatctacatatcagccattggtgtttggcgatactaatgatcaagacctttcgcaatcgacacctgtgctttcatcagcagctaggaaaagtgggaaaccacgcatgttgttcaattcggctagaatgcgtcgccgtcccttggataagaaggctagtaatactacaactaccaccactgtcactaataataatgccaactctgaagtagcagatccactgggtaagatcaagaaagagactgaaaaaaaggtggatgagggtcccatatcggtgacttccaacaatacaacaaagagtaaaagtattatcgatcaggtggaggaaccacttttcaaagtaccagcgagaaggaatataagtgagaatcaattggaatcaaatgaaacccaagtccaaaagcaacaagaacagaaccaagatgaagagcgcgaaccggtaaatttttacatagaggtcaaagatccggttaaagtaggtgaattgacatcgatgcatgtggaatatacagtggtcgtagaatcagaacttttggaaacgcgatatgctcaagtaaatagacgatacagggacttcaggtggctttaccgtcaattgcaaagtaatcattggggtagaataatcccaccaccaccggagaaacaaagtgttggtagatttaagcaggatttcattgaaaatagaagatttcaaatggaaaaaatgttacagaaaattgctagcagtccagttttacaatctgatttggattttattttgtttttaacaagcaacaattttaatttcgaatccaaacatcgtgagcacacgactggatccaatgcttctcgtgatagtaacgatctttcagaaattcatattagtgaaattgaattgttaggagcagaggatgctgctgttgttttgaaaaatggtggattagatggcgagtctcaaaagagatttttaagcctttcgttttcatcattacccaaatataatgaaacggatgaatattttatcgatcagtataagttaacagaaagcttagaggaacgcctgaaacagttaaacaaatccctagacttggtggattcggaaaggaatgagctggcctcggttacagaagaattttcaaagacaatagattcgttggccgaattggaagttacaaggcaaaacgttgaaattttaaccaatttcgctgatactcataggcgcataagggaatcattggagagaagttctttacaggaatctcttactctgggggttacgctcgatgagtacattagatcactggcaagcgtaaaggcaattttcaatcaaagagctcgcttaggccattatttggtcattgtagagactgattttgccaaaaaacaatcgctcttggaaaagttaccacaaaactccacttcccaaagtaatatcgataagatcaacagtgctaaaagggaatatcaaactctacagagaagatgcaaatctgtaaaaaaaagatggcaagaagtgggtgattgtatcaagaaagaattggccaattttgagatagaaaaagtgaaagattttagaaacagtctggaaattttcctcgaatccgctatcgaatcccaaaaagaatgcatcgaactgtgggaaactttctaccagaacaacctgtaagagaaagagatgaatcaacgaaattaaagaaagattgattatttacatgcaaatacacatttaattgttttaaagcacccgactaaatcaagactgactctcatcttcctcctcttgtttctcctccatgaatacttgattcaattgatcaaatacggattcttgttcacccagcgtctcatagtctacaatcataccatcgaaggcatagcaatattctttagccaaaatttttatgttatcgttaacttgaggagccttcggatatctttgagaaaaatgagttaaaatcaatttttgggcattcatttcatttgaaacttcaatggcttcatttatagtacaatgctttttcttgatagcgtcttcaattaattcgttatcaagagtagcttcatggatcaaaagatccgaattcttaccaatatcctttgaaaaatgctctatgttgggtctagtatcaccagagtaggacatcttgaataatttctttgaagaagatgacatgaaaaatgaaatggtattggaataggcccaatcacaatgcttagccctacaggtttgcatgttgaaaatacgaagatccttgtacatctttttaatggtgtccaaatcccttaatgatgaattactatcgatttctaatttccttctctttttatctgcagattcaagaccatcggcatactcttccagaggtattggtttggtttcccttctcacgtatgatccattaacaaaatgttcacaactaatgtaacgaatacgatttaataaatttgcatcctccaataataaccattcatttatgaagcggttgtactgccatggagttatcacgtaaataacctcgtcatcatcttgatgatatttgaaccattctttcaaaatgctaataatacctaagtggtgatcagcgtgcaaatgacttaggtacatcatcttcatattcttaaaaatcttgcaaacagtagtactggggaaatgtcttcttatagttcctaaagtattttcaccagcgtctaacagtatgattctactatcaatattaccagtttctgttttgtaagggatctttaaaagagttgaaagaacgtttctgtattttgaaggcagtgcactccctgttcccaatgtgatagcttcaacattactcttcttttccggtgtatcaaagttatcaacaccttgttgttcagtaactattttttcaaatgaagttgatggtagatttagaggtttaacatgtcttcgatatgcaaaatcccatgaccaatcaggacagttgttttcaatcttgatcctcattgactcttcccccttggtgaaagattcgatctgagtaaccgaaccttgagtgaaaggatgaacattttcactaggaatagttgaccttaacggttcctcttgtgattgcgacagtgtagttccgcgatccgttggcttactgaaacattcatagaattctttggacagaatcgaatttgactgaggtaagttgaaattttgaaccatcaatgcctttaatttgagtacagtcaaagcagcacctttaaacacaatggtattgggacaaacctttggatgagaaacaaacatttgtacgtcattaccaaaaagttccattgacttaatgagattatcattaatagtaacatctcctcccaaaaaaaaataaacgatacccaaatcttcgcagtcgtactccttaaacttttctctaaatccttcaatgtaagaatcatccggaatatccagaatcaaaactctcggaaactgtctttgtttctccaagacctgttctggagtaatttgagagccgtcatctaaagtaatcgactgaccagatgctaatttaccaaaggaagggcctttaggtacacctaatttagccgctatatcaggcctaaacttacctctaacaggttcgaacacgatttcataacaggtggaagtccttggtacactgaattgtgtcggtagttcaacatttaaaaatggatcagaagaaggatcgtatctagaggtaggtccatttttggggaacatattggcgactatagattttaatgccatattttgcctttcgttgaaaaccaaattatcgttgccgccagactgaggaactatgatcgatttaactcttaagaggccgtcactatagatttcttgatctttcatagcgtctgtctgtagcgaaataccaaatctgaatacgaaatatctccacgtagaaaccacataattaatcaaatcaccaccgtgatgcaatttcaaatttgccttaccttgatctgcaacagtaagaatcatacctggtagcccacccaaactattccaattcagttcacctgtaaggaatatatcttgcaatttaccaattctagtacgactttctgttaagcatctttgggagccctctgccattttaccaaagaaataacgatctccatgatgggattgtaatagaagtaatggatgactcgtatcagaggttggatgtgctacagtggtaaggtagaacatcgatgagaatctgagagagttttgaaattctttatgcttttgatccttctctgaaattgagttagaactcttccacctaatatgagataagtaaatacctaaagtaggatccaaaggtcttcccaaacgacttctaatggtcaaagacttgaagaatgtcactttgaatgtaggtttttatgtactagtcccagtacttactgaaatttttctattgaaggaacgttcttaaaaagatcttcgttgaaataggaccaaaaaacaccaataccacaagcttttcgaagaacttgatggtttcttaaatcgttactccaagaaattatatgaaatctagatacactgttatttgatccaatgtgacgtccgaataacacaaactcaacttagcacagttaccagtaagtgtaaaaaagaacaaaaaaaaaaaaaaaaaaaaaaaaagttcaccccgcggtaagctttaccagtattagtacatttttattcctgaaattgctagtgtcaatgcatcgctactgccaatgggaagttgcgtctttataaagagattgccagatatatgcttcgctcagtaacatttcgatgtcagtctctttccaatttctggttggtggattctgcaaaaaagtaatgatgttttggaagtccatatcaattagttggtcactccaccttatcagaaatgctgcacatacgaatacgtgaaattcattcaaggaagaacgtcttaatcttggtaaatcttcacttgaaccttttgaagttgtactaggtgatgtaaaagattgaaaagtcatggatgccggctccgttggtgttcgtggtggtcctgtatcagacatcatagctgcagccgatgatgacgtctctagagaagtttctgataagtaagtatcccacattctaatcactgtactcatctgaaattctctcattaagagacaattcatccatctaaatgcaaattgaatgaactctacctgttcggattggaaatggttgaaaagatcccgatcgatacgttttactaattggctcaaatttttgacctgttttaaaattcctggttgtccatgaatatagttatctgtaatctgttccagcagttttgttaagcaccaaaacgtatcggcctccacatcatttaattgtgactctgtcaaatacgattccggatccaatttctccacatcatctatctgagactgtggtaaatattctgtaaggaaagtttggaaaaaaggtgtcaatagatcgttaataccttgtacatacccacttgccggatgtctaatggcccaaaggtacaaaattctctgtaaggatctttgtaccgatttaaattggtacaatggtatgtgggggttggttctgggaacgtcaatttctatctgatgccacgtcggtacgtccctagagtgctgttctgagaaaacatgatccaggccatcatgatactcctgtctctttcttttcaacagagattcttgtctctttgtatttgcaggcaaatatccaattaagagcttccatactacaggtctttgaggtttggggatcccgttccaacttatttgcctaagttcctgctggttgataatgtgtttattcttcaagatacaatcaaattttgccatcctttgaagcatcgaagttaactcctgtgcttctctctcgttctccacttctaactgtgatctcagatctgtggtcagagttttttgtaattggggtagctgtgggtatgaaaacgtagagcttgcattttgatttgccatcgccgttgtggaagaggttggcgtagtcttaacacttgatgatcttgtcaccttcggcgtggcaggcgaagccacaccgccgttggtaattatggggataggcatgttgtaatcatcaataacagcactccaatcttcatctaagtccttaaaatatttatcactttttctgctactgccactaccactaccgctcccacctccgctgtctctataataagaggggttgtacttgttggcagatgtgtatggctttgaagaatccgtacttgttcttctgctactagcactaccaccaccagacgaagaaattggcgttgagtactttaagggtgaatatgacgatgaggacgatgaattttttatagccgtcgtctgttgcttcgccatagcatcgaaattaccgtctcccgtataactactattcgatttcggtgaactggctgatgaaattctccatgatttcattagagaactaaccaagttagtaccactacttgctaaactgtatccgtatccatacggggagctaccgtgatctttttggtgcatctcttttgaacttgatctaactcccataatcgtctaatctagaacacagacgaatgaatacaaaaaggtctcaaaggagccagtaaaaaaaaccgtcagggaataattccaagcccagtacagatatttttacactgttgtgattgattccaacgctaacgtgggttctgtgaattgattccttgctgatcaatggggcaggagtattgtacttttgtattggcatcgtttgtattattgttaccagcgccttctcgttcaaaacttgtatgggatcgaaaacccttatcaccacatacgaggtgagaaatagccattggatcagaatagagaaacgatttataattcgatatctaggcaccaattctctctgcttatttcaccgatggattctgttgaatttttcatatttttccatggtaaaacaggctttttccacaattatacggcatttttttgggatttgagaataactgtacttttaggtgttttctaaaggtgcaattacgttctatcttgcgtcaataagtgcccaaggtagtggaaatggctctattacgagattatccaacaagcatgtaataatgtatagtccggtgtcattagcacgtgactccgctacctcacttctcgagacaagatcttaaatattcaagtatcgatcgagcatctgttcacgatacccataagttgaaggtatatgatgtcgatctgttcagtacaatcgtttttgtcaatctagctgactctcctgttatctttttgactctttacaatttgtccattttcaatatcttgatgtaattttcaacatgaaaattaaaataagatcacggttaattaacattaacaactttttgcatttaatacttactcataataaatctggattcatttcgaattcagactcctttctatttcgcacgttgttcggagttctcttgtcaaacatacttatatatataaataatcttttcgagctggtttattccctgcatacaagtatagagctataactgtgggaagtttagtgatttcaagaaagacgaatacaaggtaataagcacaataatgtcagatgctacagttagtaaaccaggtgtgacagttttagcatcaaaaatctcaaaaatatatgtggaagaaatcacttccaaggtaaaagccattcagaatattagaccccatggtccacttctagtaggatttctagccaatgatgatcctgcagctgagatgtatgcatcttggactaagaaaactagtgaagacatgggatttcgttatgaattaagaaggattgatgagaaggattttctcgaagaagccattattgaagccaatagagatcctcaagtcgatggtataatggtttactatccggtatttggtaatgcacaggatcaatatttacagcaagtggtagctaaggagaaagatgtggaaggtatgaatcacgtttactaccaaaacatgtaccataacatcagatatttggattctgaaaatacattaaaatcaatactaccatgcacaccactggcagttgtcaaaattttagaatacttgaaagtgtacaacaatcttttaccacaaggtaacagactttatggtaaaaaatgtgtggttgtcaatagatcggaaattgtgggtagaccgctagcggctctgctggcgaatgacggtgcagtcgtctattctgtcgatattgacaacattcaaaaatttactcgtggtgaaggtcttaaatttaaaaagcaccatgtggaagatttgggagcattttccaaggatcttttgaaacagtgttgttcagaagcagacgtgatcattaccggtgtaccttcagaatcttacaagtttcctaccgaatgtattaaggaaggtgcagtctgcataaatttctcatctaataagaattttgatgaaactgtcaaaagcaaagcttcgctgtacgtgcccatgactggtaaggttacgatttccatgcttctaagaaacatgctgagattaatcgaaaacagtgagaaattcaagaatccatgataagaacattctatatattgttattattaatatcatatactaatactatattatacatacgggaacaatttttttttctattcttttaaatttttttggggggtaaatcattttttcttctgcctcttggtggaaggttcatcgatatcctcagcagtgacaaattcttcgccataagtgtcctcttcagaattttctgcctcgtcattcaactcttcaccatcgttcagctcttcctcttcatcatttatatattcttccacatcatcatcttcttgatcttgatcaaatctagatttcaaacccttcatctttctcgtttgtaatttgttcaaatcttgcttacccatatgtattctaccgagtttgtcacccattggatccatatcaacgttcttaacggtcttggtattcaattgcttaggtttcctacgtgcttccttctccatttcaggtgatggcgattggattctaccgattttgaagtcaaatctgggtccggtctcttgcaattccactcttggtaatttacgaccaccttgttcacttctgtaagttctcaatctgtaaactctgaatagaacatttggcaaaggctcaccatcttggaaatcaccttgaagtgttaccgatatgacatgttgtagaccagcgacatcgtacaaatcagtaactgttcctctaaagaaatccagaaacaaggacttgaggtgcttataaactgggtgagtatcaaatgcagatccttggaaggagaacattggttttaatccgactgcaaaagttttagctttgaaatcttccaacagtttgtaattgttaacaatcatcaattcaaccatatcgtagatcttgtagccgaaagtacgaacaaatgtcaagttgtttctacgcttcttagaggtcgtggaaagcaccaacaatgaacagtcgttcttttcactaaagaactccaatggtgcaggatcttcaaaaggtctaatttcattctttctatcaaatctcttcatatctggtttcttcaatgaacttaaatccaccatagcatcatgcagtaatttgttagaagtctggcctggaacgaataatgcttgtttcacattttctacaagctttggctccttttccttaagagctctcttagccttggcggtcttgggttttctagtttgcttttagttagtaactaatattcagctgagaagaggaggtgaaaaacatataaacatacactgtcctaatcatcttgatactttaaagtggtttcacaaagatcagaatacaccactattatcgacgtaatttgaactgttcgttatgcgatgagatgagatgagatgagctagaaatgagcttagacccaaaaatttttcatcgttagtagtgattttagtttttttcaacataatgaagaagagatgatgatcctttgaaatgataaatattgaaggtatcaaggagggaaagagtactggaattgggctgtattggttgaatcaatgagttctggtcaacccttatttcaattgaggaaagagttgagtgttcctctttccgctggtgaagacgacacgactaatcaaacgacagatacgaatactagttatgagagattccaatctgtggatgtatctctagatacacatcaccacgaggataagcaaacttttaacaatattaagattctcactgaaaatgaaaggtacgtggttaagagattagcgcctgacctttcgacattacccattgactcttcatcgtctgaaggtcttgtggatacacattctggcaaggcattggttaacgataatgattttctatacatttgggactattactccagtcaaagaaataccaatttttgtcgaattccattacatgaggaacatgtcgttttgaaacacgaacctaaatgtctaattacatggccagctgctatggacgatactactcagatgtttgcagaaaattctggtggtgcatttggtggcgtttgcattatacatcgtaaaaacggtcaattgatctattacgaagatatcgattcaattaacaatttacatctacagctttctcacagcaaagcacatacggttaatctgaaattgaaagataatgaaagtgttactgaggcaataaattgtgagccagctggtattgtcattgctacttcattaggtagagtgctttttgttacgataagagattcatcgggtaaaccaagtgtcagagtgaagcaacaattggttaaaccacaacaagggtttttcttctccacttttaacccatcgaatgaagttgtttccttaaagatgggtcctattgtcggtaggggtgagagattattatatattgttacaagaggtggtaacttccagatgtggcacctatcggtaagcattagttcttacaagagattagatgtgcagttgtttgaacaaatcttagattcattgcaagatctctacccctttgctcatggatctttacaggttctcgattctcatcctttatttccagattcttcctcagttcatctagttctgtcttctattaccaacggcgatgaaatgtattatattttaagtactatagtgcttgacgagaagacaaagagctttaccattttctcaacttacagattgaacacctatgtgactagttttgttgataagaaacccgaactttttattccagcagctcttggtgaacagttaactgatacaaccactgtcttcgttctatttaatgatgctgtggtacttacacaagtaagttccaaattggattcttcttatccgctaaggaggaaatgggaagatatcattagctttagagatgatgtgaatctgataggatctggttatgactctgaatctatttacgtcatgagcaaagaaattggcgttttggaaattagtgtcactggtgaagttaatgagagtgaaaagtctatggaagaagttagatttgttaaatctcatgtggatcaagcagtatatttttcaggaatttcttcgaaccccattgaatttaatctacctaaggggatatcactggaagtggatgagatagaagcagatttacgttcttgtagcgacgaaatttttcactcaaaaggtaaatatatcccacccatgatgaatactttaactcaacatttgagtctacgagttgatcttttcagaaatttactaaattttgtggaacaaaattttaattttaaggtatccccaaatgaaaaattaaagcttttgcaaaattttgaaattctgaactgttgccttaaactttgcatcctattaaaaaatttaccagaattaaatgaaatatggaagaagactttgaaattaagaaatagtaacttaacaactgaaactcttttcgttggtcagcttcatgagtttcctaaagtgttttcacaatttttggcccaattgaacagtaagtcgatgccagcatctatccccctgaaaacttctgtggtggatcttttaatagaatgtgtctataaaggcattctagaagaaggtgaaaaacagcttaggtacgatcttttcaaattggatccattagaattgggtattgaattaccatggttcatcaattatgaaaatttggagtctataaacagtagcttcctcgattttaagttttcgactcaaataacatccgatgaagataagaataggttactcactttgacaaagacgttatactaccttttcaaccaggcaaatctttggttcaaggaatattctcaaagacaagagaccgagttatttggcaaattccaactcttattcttaaacaatcatttgtcatggaatcaggcactgctggattcaaacttgaaacaagaggccctacagattgctgaattttaccaagatttggaggcattagtggaaacgcttgaatctttagataagtcgatttcacaggaggcttatttttattatttcgataaatttggatatcaatttggctctacggtgttccagtactacatcagtcaaaacaaattggatgatttattttataggttccctgagcaacacgatatgctggttgaattccttggtagttctgacaaatatggcgaagtcgcatggatacaagagattctcgataaacgttatgatgcagccacaaccactctatgcgatatttcccttggtgaaactaagaaagatcaacccttagaacaacgtcaggtttacctgaacatagccaaattgacaggattgatgaatcaaccaattccattggatcagttgaagttaattcagggtgatttagataccttggatgggcaaaagaatttgcttttcaaattacaagatccacgtatcaagcttgcatctggatttgctgggacaccatttgaagagttattccaatctttaaccagtaagatagaacagcatcaaagtttgagtttacgacttttgatagagatttacagcatgttggaagacacagatagcttctactgtgctttaaaattaattgcattcaatggtgattcccttggttacgaacataaaaagtttttagtcgctatggtatggcgtagatgcatcctaatagaggattgggattccataaaggacaacaccaagagttctctttaccaagtgctgtgcaaatacttcagtgaagaatttttccaatcgggtctggctctccccagttttgcattaatcacggatagctccttgttgaccatggagtacttacaaaatgtgtatcaagaaagggaggacgttatcaaggatagttttcgtaaggaatttgaatcggtaagatcactggaaccacaattcgataaacgcatccaatctattattgcaaccgctaacgaagctgcaggaaagaaatgtattgtcaattacgaaaccaatacagtcgaatattattcctaggtattaattaaactaagtaatattaattttttcttttttttttcctattattatttaattctcatcatccatgcgtatcctcactaaagtttctggtaatgggccgtgtccatcttctggttcttcttcatcttgcttattattattactattattattattcttatcttttttccatgcaccaacttcgtaatcgccttcagcgtattgtaagaggctcaacccagccaaagatatagatcttgatatagaattccagttctccatgactctcgaaaccgatgtggcgtttgaattcatctgacgaacctggcctgccaattcgtcaagctgtaatttcatatcatcagttagagcagttatctttttaagggcttccaattccctctttttagcctctatttgctcctctagaggcaacatgacctcgtagaattgatttccgcaaacaagaagactcgaataggacgtcttgatgctcttttcatccacttctcaccatcaattttcactttgatatttggaattttcaatggatttagtctagttgaatatcgttctaagtgacttggtgatgggcctttatttttgtgggaagctcagctataaacaataaacaaaagatcaacagtattagaagactaaaagttcaaggattcagaaatagtggaagctatcaggctcgttgaaattgctggcaatctactcagcgtgtttaataatggccaggacgattaagaagcggtcgagaagcggaagtagcggtactgccgccgccagtaaagttgccgctaatgcttcttcttcttttgcaacaccagggattcaagagcttcaagacttgatggatgctcaagaaggcaagatagctgcagtgaagtcagcctacagtcaacaaaatacacaatttgcgaaatccaattcagctctgctgatgaaattgacggattttgagaagaagattagtgaattggttcaagaaaatgtgatactccgatctcgaatctccatgaatgaatatacctataaggaaaggctcaatgaacagatttctatcttggaagagggaatttcaagaagattcgaagaaatatttcatatgtttgacagtataagaaggaaggaaaatttgccttcggcgtcaacaacatctggtagcccaatggaatctagatccattttaaaaagtaaaaggtctcgtccatcatcggggagaacttcgtccatacatttccaagatattgataccaatgaaaataaaatctcggaagagatacagaccaggaaaaagcataaaagctctagaagagaatctatattcatgccaggagatttcgattttgcatatgaagaccaagatcaaccgcaaatagaacaagaacaagaacaagaacaagaacaagaacaagaacaagaaccaccagcagcaccagagccggaaccggaaccggaaccaccgctgacggagactacggtagcagcaacatcaccactaccgctaccaacacagcaacccctagatgcagaaacaaatgaaattcaacttggaataaatgaagagcaacctcaagacgcgcatgatgaatctctaaatttcaccaactccataattgattattcgatacctgaagaagctgccaccgttggacctaattcaagtacagaagctgaaccaccagcatcttcaaaacttgaaatatttagagatgagccagagcaagagacccatcaaaagcattctatacctcccaaacaagaaggtaaaaatcaaagtatgacgtttatgccgttagaggcatcacaaagcaaaattaaacattctatgaggccattgagtacaaagacaaagaaaaagatggtagatgaagttatgcctagcacaaatgtagcttgtgatttagatttccctcgaacgagaagaactcgtggcaaggccattgattatactttaccatcactgagggcaaagatgagacggccttcagagaaattagtggatgctacgactttcaccaatatacaagacctacaagtgacccatttagatagaaggtctagtaagggaagttctcgaaaaacaaccatttccccagagccactaccagatttaagagctaagtcagaagaattacaagcgcaagaaccgcccaaggagagtataccaattgagcaacctaaagcggtcacggaaaatacttcagaaggaagaccaaaaagtggtgatgaaaataaaagccaggatcatttttcattttcttctacaacaagtacttcgagtggttcttcgggaaaagcccttaaagatattaccaatactcctaaagtgaaacaaccaccaaagacgaaaaaattgttcaaaaatgcaattatcaacgatttatgtgatcaaattcccaataaatcccaaaattctagtaatgaccgtaatgtaagctttcgtttacaagaagaagacttatcagtttttgatttaataggcgctgataaagtaaaatatccccaaaagacctatagagccaaatcaagacggaaggcttaatggaaaaatcataatcataatgtttatcctgtaatacaacaataaaaataaagttttaatagtctacccaacagaactaatagtagaaacgatcattataatatagcatgaaaagatgttccttttattttttttttttttttctattttttttgtttctcttaaacgctcatattcatttgaattctaccgtgtggatgataattttcaattttgaaatcttcgtatttgaagttatcaatattatccattttccttgctatctttaactgtgggaaatcttttggagttctgctcaattgttctttcagagcgtcaatgtgatccttatagatatgagcgtcacccatggtatggataaattcaccaggttccatatcgcacacatgtgcaatcatcttggtcaaaagtgaataggatgcaatgttgaatggaactcccaaccccatatcacaggacctctggtacagtagacatgacaatttaggcttgccctccttggggaaactaacgtagaattgtgaaaatacgtgacatggtggtaatgccattaatgggaaatctggtgggttccaggcgctcatgataattcttctgtcgtagggattatttttcaatttatgaatcacttcgtgtaactggtcaaacccttgtcccgtatagtcatcgtcacaagttctgtatttggcaccaaagtgcctccattggaaaccgtaaacaggacctaaatcaccttcacgtctgtcgtgcaatccaattttatccaggtactctctagatccattaccttcccaaattttaacaccctgttcagataactttttaccatcagtacaacctgaaatgaaccaaagtaattccaatattataccctttgtgaaaactttcttagtagttaataatgggaatcgatcattggacaaatcaaaacgcaactgtggtggagcaaagatactatatgtaccagtaccggttctatcaggtctaaattcaccttcatcgagaatcctttggatcaaatctaaatactgctgttcttcagcgttggcacttgaactttcagttctttgtctcttgtgttcttgaccagtcatgatgaatcgatctaatgagtaattgatgaatatgcaactatgtctagggccgtaaccagtgggtcttgtagtgttgaatttacgcgatgacctttcaacatggtttttttcagtaaatgtacgtatacataatatagcaaacaatcaacacattatactcctcagtcgacgaattgaagctggaaagaagccctaagagatttgtataatgactgatttgaccaataaatttaaatcatacctccacattatccaggatagtggttttactgctgaggatggatccgatggattcaagggaaatgaatcgagcactaataaaagtaaggaaactgaacgtctaaggctacaggattcgttcattaaggaatgttacgatctattaaaatcattgacacaattgcgtaagattttaaaatctgtaaggccaagctatatgaatgaagatgaaatgagtgaagaagaaaaggacgacgtagatactgaattgagactacaattccaacagtatattcaaaaatttagattaatggaaagatatgaaaatgaaaggcagaggttgatttcagaggaatttttatcctcaaaggcatatttgaaaagtttctttcagggaattagttctgaaaagttgacattatttcacaaagccaacaatgaatttagattgggagtgctcaaatctttgagcatgtggctcaacatcttctctagtgaattttcctctatgcagcaggagagactggatgcacagaggaaatttgaagctcttgacttcaattcaggactgcagaatgtcgttagcgtcagttcagtatcacagacaccagttgtggagtcaacccaagaagaagttagacattatgaagaaacggtttccaaattgacacaagaacaattgcagttgttggagactgaacacgaggaaatgttgaataaaaaaaatgagcagttgaaaaaagctgaacagttgaacaagacaattatagatatcgttggtattcaacatgaaatttcagcacacttgcaagaacaatctcaaaatattaatagcgtattggataatcaagaagacgtggaaataaatatacgagaaggtaataagcagctgacgaaggcaaagaaatcggctggcaaagccgctaagatgatgacttacatggcaattataatggggtttatgatacttttcttggattatataagttaaaatagattcctttattattattctattcgatgatcgtacccgctgcaatggtcctaccttcctttctcatgactattctgctcattcttctattttgagtagatgtcaggaatgggatccatctttccttttcgaccaattcaatttcgaaaatagcagcttgattagaacccaagtgcttcacctttttcttgataattttacttggatcttgcttgtcaataatcgaatttaatttactgacccttgccggttgttcattaacccccttgaaaaacatgaatggtgtaccaggcaatagaggacgactcatttgaaaggttaaagcttgtactttcaatgtgttcctcactgggatctccacaccaacagatgcagccaaatcacctgcttcaatgatttctgcaaaggcattacgtagtctgaggactgcgaaatcacctttggtggccacaggtactttccgttcattattatcgatggtgattctattcactacaacactttgttcactggggaaaatgttcaaagtttcacctggctggattgaaccagattccactttaccggaaacaaccacttcttcgtttttattgacagaaattacctctgtaatggaaaacaggaaaggtgcattgataatatcttcctggtatgatttctctatttgctcagctttatattccaattcttccactagcgaacgtccctggtaccaattctgcatctcatgtgtggttctcttaacgacgtttgcaccagttagaccactgcagggaatccagctaatttgttcaggtctgtaaccgatagtttcaaaaaaggaggaaagttcacgtctgatttgctcgaatctttcttggtaccaatcaacagtatccattttgttcattgcaacaatgatgtggccaacacctaaacttcttgctaaaagggtatgttccttggtttgaccatctaggttaaatccagattcaaatgcgtcagtaccgcaatcaatggataaaacggcagcatcagcttcagaaatacctgcaatggcattgggaacgaaatctctgtgaccaggggcatccacgatagtaaatctcgtcgatggggtttcaaaatcgtttgtgcaaacagatactgtaacaccacgctctctttcttcaggtgtttgatccattacccatgccagatggaatgaactcttaccaacaatctcactttctcttttcaattttctcaagtggctgatatctactacacctaaatcgtatagtactctacccattaaagttgacttaccggaatcaacatgaccaatcacaacaaaactacaatggggtttacctttagataaatagttctgaatatcaattggatcagtaggctttgttggtttcgtagccaatttgggttgtgattgctgctttgcctgtttttcctcttgaacttttaatttggacacattttcggtgacgttgtctaaagcccttgattgagcttctagcacaacatcatcaggacttggcttcttgaaattttccaccgcctttgtttttgctgctttaacagagttagtattactaaaacttgctggaggataataaggtgcaaacatctcatcgtaatttctcttttgtaactctttactgggtttatcagatgcaaattgtttcatgacaatcgtagccaggactaaagaatcattgttttgtggtggtgtaggatggttagcgttacctctcatcgctctgattacctcccacggatctagaggctgcctctgaggtggttgtgatggtggtaagtcttctttcttctccctaggtttttcccttacaggcgcctgtttccttaatgcagataatcttgaacctagagaactaggttcatttgtactcggttttttcaatgctgcaagtttagaaacaagaccgttcgtattcgtgctcgcactcacactcggttgggacgcccttagcctctcacctagggtcctcttagggaactgctcgcctctagtaccatttctcaacttcgacagcagagaaatacttctatcctcctcgtcattcggagcactggttttgggagtattattttgagctgctctagccctggctaactgttccaatttggataacccacctgatgaagatcctaggctcactgaaaagtgttaataagatgaaccaatttatttttcgttttcatttttttaaagcacttctcattctaaatgtgagcattcaggacccagttaattagtagagaatgagatgcaactgaaaatgcctttcgtttatacataccttctgattttttcttcttgaaacttcttttcaatatttttagagactcatctgggtcaaaattagtttcaaaaatcgtcttcttcaatgcaaaattatcccagccctgataatccaccatctcctttttaacatgggggaaaagctggttcattaactcgtactcatcgtcattcaaatactcgtctaaatcagcctcgttttcgaattctggtaattcttcttcataatccatcaaatcatcatcttcgtaagcaaccatactggtctaatgatacttcttaccacttactgtataccttattgaatcgttttgtagtgattatcttttgccccagtgctctttttttttttcattttttttccgacgggcatgacaagcatcgcttccaaaaggtcgctcggttaacttgactcattatgaagtcagaaatctttgataatcaccaacatacaaaactttagaacacattttataagtcatttgctcgattcttgactaaatttttagcgtcctacgtcttgttgaagtcgatgaatttcgatgttagccgttagttcgatgagtagtagtcgagaaactgccaccaccaagagttcgtcactaataccgtcaactttcattttggccagatcgagtagatatcacaagtgtgctttgttcaacgtgctgccgtctgatcttacaaatgaaagtgcgtttgccggtgaaaagtgtagattattttatggagatgtagttcttgatgaatatattgagaacggcagtagtatatcacggtatattttgaaatttgagtggaatagaggtggtagtaggaggagaaatgtgttctgtcatactgaagttatggataatgtccataaatggaatgaaactattactgagtggtcatcggagaggtttaggataatgatgcaatgttcggatgatagatatatactattagaattacaaatttgtgaaactagcgaggatagaaaatttagagacgttctatgtaggattagtgaggagtttgaaatttgggcggagctaatggacgattagtaggttgtaacagtactctatttacatgttaattaattttattttattttactttattttatcttatcttaggaacggtaccataactctttccttctctttctatcctctcttgcggtgactctctttacatgccatttggattttatagttgtcagacgtgaatccatctcttgtttccattcctttggtggttcagataccatcgagatgaatagcggtgatacgttgtattgagatgctaatgattttctagtattctttgcgggatcttctaatctcaacctgcggatttgctcgatttgttctggatttaggtgatagcttttaccttggagactgctacggctgggcaagactggtggggcatccggtttggagagtacatctttggatgcgatttcttggactaactgttttcttggatcgtttgatggtaaaaatgacgaaggaatggtttcactgttgatagatcctgtaggagaagatggtgctctgttaaagtatagtcctgcaggtactttagccctcatataacctttataattggatgcagaactctttgcattgtagatagtggaggcaccttttagctctggagtcttctttgaattattgataattttgctcagattttttagctggaaactggaattgtggattctccgtacgaagcactgcatgatggtagtcagatatcccttgaaagcccttgttactgcatgcaatgggcacttctcttgctgtttcttatgattttaagctgctcatcaatcaatattgaaaaatggtggaagaaaaaaaatcaaaaaaagcccaatcgctaaatacgtgcactaatgtataagcgatgagcaactgaaatgaactaaagaagaccaacaagggcccatttgagcttcaaattgccatgtctgatgatgaagagcttatcaggtttgtccaagaacatagaagctcgacggttacttcaaattttatcaagacgctaaggaaattggttgagaactgtcgaggtgactctaacaagtttgtagctggatgcaaagctcttggtggatttcaaggtcaagatgagtttttagggacattgtttgtcagattaaatggtagaaaggcgattccactgccgcctgttaagcgcaagattcgattacagttggatttagatgaagacgaagacgaaaatgaagatggagaagagcaagatataccactgttcaaacccaagaggaatccctcgcagttcaaaaggattgataagaatactgcacagaaactgaaagagtttaacaaggatgctgcagtgttaaaagataaggataagcaacaaataagcacaaccacagaagaggataaatctggtacttcaattggtatgcctaagcttcaagcagtctctgataatgaagaggaggatcaagaagagtctggtaatgatactgatggatctgttgtttccgaagattctgtagccgaggatagagaatggtacaattatgacgatgactacggcaatccagtgacagaggaaccagccaaagacatggattttaagaaccctgtacaatcttacaaaaatttcaaaatgcctacgacttcggtacagttgtacaccatgcccgtcagtcagagaaagcagtttttacctccatttctcaaaaaaaattatcagttacaaggtgttactgatgcgacgatcgttggttctttcctcgattcccctttgagtggattggtgaatccatttaagaatccagatggtgaactgtccgtcagcgccaaaaagggtagtcatttagtagctcttcgacgtctacagaaggataagactcaaagatcaagagaagccgccgatgtggtggggaccgcactaggtgatgttttgggactcaaggaaaaggaccagaatcaaactgctgtcgatgtatctaatgatgctacagaccaagaggtatcttcaagagaggatattttacaagctcgtaaatccctccctgcttatgcgatgagatctcaaatcatacaaacgattagagataatcaagtgactattattattggtgaaactgggtctggtaagacaacgcagttggctcaatatttggatgaagctggtatttgtcaaagcggtaaatctataggatgtacccaaccacgtagagtggcagcgatgtctgtggctaaaagagttgcattggaaatgggtgttgaattgggtcaggaagtcgggtactccattagattcgaagactgtacttctaataaaacaaaaatcaaattcatgacagacggtatacttttgcgtgaagcattgatggatcatactttggaaaaatacgattgtattattattgatgaagcgcatgaaaggtctttaaacactgatgtcattttggggttgttcaaaaggttactggctagaagaagggatattaagctgatcataacatctgctaccataaatgctacaaaattcgcagatttctttggtggggcacctttgtgcactattccaggtaggacttttcccattcaaattatttattctaaacatccagtatccgattacgtggaagcctctgtcatgcaggcaatacgtattcatttgtcggcagatgtcgatgcaggtgacatcttaatattcatgacgggacaagaagatattgaggcaactaatgacgctctacgagagaaattgacagaggtctattccaagagtatgggtataacccgttatgatgagattaataatgttgaaatctttcctatttattctgcactgccagctgatgttcaaagtcgtatctttaagaagttggaatctggtaagagaaagattgtgatctctaccaacattgccgagacttctttgactatagatggtataagatacgtggttgattgtggattttccaagttaaaagtttacaacccgaagattggtttggatagtttgactattactcctatttcaagagcaaatgctgatcagagatctggtagagctggtcgtacagggcctggtaccgcttataggatgtataccgaagatgccgcctacgatgatatgtacagccaagcaattccggaaattcaaagaactaatttgtccaatacggtacttcttcttaagtccctacatgtcgacgatatcctaaagttcccgtttatcgatccgcctccgttacagactttgttggcatcgttgtacgaattgcattttttgggggcactggataattttggtaatttaacttccttgggaactgaaatgtccaaactaccattgagaccttcactttctaaggctttgctcatttctgcaaggaatggttgtagtgaagagatggtcaccatcgtttccatgctttcagttccaatcgtattttacaggcctacagagagacagaaagagtcagatcaagctagaagcaggttcttcgttccagaatctgatcatttaacgttcttgaacgtttattctcagtggaagagtaacaggtattctcatagatggtgtggtagacattttcttcaataccggtcattacaaagagctagagacatcagagtccaactggtcaaaattatgcaatcacaaggaattccattggtttcctcgggtacagaatgggatatcgttcggagatgtatttgttcggggtttgctcatcaggcggctaaaatatcaggtttaggtaaatatgtccatttgaaaacggggatggaagttcagctgcatcctacaagtgcattatatgggatgggtgatcttcctccttttgttgtctacaacgagttgctcatgacaactaaggagtacattagctgtgtcacatcggtggatcctttttggctaatggattatggtggactactctatgacatcaagaggattaaagaaattgataataatgatgtaaaggggtttttccaattagttgacgaaccgcaagagagagaggatgaacctgatgagttagatttaaggatgaaggattgtttagccgctagagatagagtcattcgacgtcttgaagaaagcgacaagaaatttgcacaacagaatagcgattcattacgttcgtcatcgtcatcatcgtcaaacaagagggataccgataaatcggtgcaaattggattcaagagacgacgtccgttttaaaatggtatattcatatgtaataagtaatgtattattacttaaaacccacgtaaaatggtaggaggttcaggtggaccaaagatactattttgaaagcccctgtagaatccaccaaattggccacaatcagattgatcatacaattgagaagcttgagatatccattcacgcatgttatcaattctacgttcactagcaggatgggtactgagaaattcgaatcttgctccagcaccaatgtttttcttctcaaaatcagacattctgccccaaagtttgatggattcttgaggatcaaaacaagcccttgacatgatcatcagtccgatgtaatccgcttctgtttccatttgcctcgaggcgggcattcttagaatgctgtccagcaacaacctgttaatggattctgcacctgttactgtgtaaagcaaggtactcaaaatcagatagatgggggtcttcgacaagttttcagcggtatgtcttgccaattgatgagagaattcatgggatagcacagttgccagtccatcatcattttgacaaatacccaggatggaactaaatacaaacactttaccccctggtaagacaaatgcgttaggtggcgcccttgggttattaacaacatgaactttccattcaataccttgtaatgaagatttatccacgcttggatcttttaatgctgcatccactatcctcgagaaaattttgctcactctctgtgttgttggatgggtatcaggtaacaggaaaggtcctgtttctctaaggatggatttataactcgatttaccaatcattaactccaatgaaggcggtatccataggaatcttcttctaccgctcacaggagcctctttcaaattagctaagtagaacagtcccccgccacctgctacaaatccaagtatcttcctggttgtaggatcatatatgttgagttgaaatccaggtcttgcattgttaaaccttctgtaagtggcctgttgataggttctaaaagccgtgagccttgcagatgcatttttagcactggggaagatcttactactaaaccgtttaaacatcggtgatctattcgtatgtgtatctgatcttgctttttgtgagattgaatgagtagtcctttatttatagttgatggaactttcaagttaaacccatcgcatgctaacctaacaagaatactaaggatattcagcaccaaggcatcatgggtagggcagaatatggtaccgctaaatatgcaagcaagcagatgaaggccagaggcctgcaaaagttaaagttttactgtcaagtgtgtcaaaagcaatgtagagatgataatggattcaaatcacacattaaatcaccttctcacgttcgaaagatatcacaagtatcacaaacagatattgatgagtatacaagagaatttgaaaatgatttcctaaggctactgaagttggcccatggtgagaagaagatcgaagccaacaagttctacaacgagtacattcaagataaggaccatgtccacatgaatgctactaggtttacatctctgactaaattcattaaatatttgggacagactggtaagatacgagttcatggtgtagacgtttccaagggcaacaatgataagagtgacgaagatgctgatgatgatatcgatatgggacaattgatgattagttatatagacaactctcagggaaatctgcttcgaagggaaaaactacaggagcttgcgaaggatgagaagagtgatcaagaaattaaaatgatgttattacagagacagatgcagtcagcagcagagaatgtagaggaggataaagaggaagagatagctgccccggtagtacgggaaccagttggtaaagtttccctccagttaggcaaaagttcaagtcgatccaaaaagagacccaatattcgtaagaatgtgtttcaatgacaaagcttatttattctgtgtttaaatatcgaactctacatccggagacacgctgcggtgactttgatgatcctgatgctgctgtagtcgttgaatctccatatacttgtttctggttttgaaataaagtatccaagcggtaatcgtcaagaccacaccggtgacaagaatacttatcaaatcaaatagtttggaacctgtagaattcgattcaccaatatttttaatacgagaaccgacaaacaggtatgcaaataatttaggtgaggcaatgacttgggcaatggcaaaattgcgtaatgacaatccgtgtacagccgcaacagcaccattagttaaggaatagggaaatgggcatagtcttagcaatgctaagatccaatagctatgattctcctgtaaaattgcagcaaacgcctcaaagcgaggacttgcatgcactaattgttcagctcttgacctgagtaaagtctggaaaactgcaaaggatgcaattgatccaaatacagaacctgctactagaatcatccaaccctcaaacgatacaccatagattaaacctgtagatgtgctcaaaaaggagaatccgattaatggtgggaaagaaacgcaaaagatgagtaaaatcaatatgaaggcagtcttcttctgagatttcaattcgtttgatgtatgtaccagccaatgtaacataggtgtatggaagacaagcaacagtatacccaagactaatgcacataacccaccaatgataaccgcgactttctgccaaactggtaaaaatgcatagtgattcatcagcttgaagagagtttttttgaaatgacgaactaatctctgacgtggtgtcaaatcgtatacatctaagaaatcgtcttcttcaccaacgccatcaccaccaatatcgtagtcatcatcataattaggcctagataccatagctgggcgtggtgaagttgaagaacctcgcatttcacttagatgaatcctagcatcttggcttgaagctctaacgtgttgactcatctgtgagagagcttcagatccatttgatccccctataaactacaataacattcgttatacaatctctcttcttcgaagcctcctgcttacgccctagacaaaagggaggggaagaaaaaaaaagaaaaatatcggaactccggtgaaagcacgtgcaatttgctggtaacaagatggagcaaactactctgtactatatagccaattaattagccgcccaccttcctacatacctatactatggcaatatgactttattctgcttctttcctacctctcttttcatgccccatcctcacaccgcgcggctacggtataatctcttttccatgcagcgtaaatctatggtattctggaaagaaacgtcatatggaaaattcagcgtctctagcgccgggaatagcagtggaaatgatccaagccttcataaattccagcatttctcctcgcaatttgttagtcttcgggggaggttcaaaaggacactctatcatccgtttatacgttcaccagtcctcccagatacgaaggtgacaggaaggagggattaaacttgtctacgtgttctcctctagagtatcgatttgtatcaggtcgttcctacaatgttgaatctattattgcaagaagcactcaagttgaagcaaggagggaggtccctatggtggctcgatggttagattagtgatattaggaggagtatcttgcccttcgaacttgctctatagcaactgtatctcatctcatttgtcgaacggtattatagacaaataaccggaaacctatggaaattgttcgaattgggggggcaagaagaaggggggccccatgtttacgtcacgcgtatcccttaccccgcgaatgactatataaggggcaccaaatacacgatagagtcaagacactcgaggaatctacgaccagtagctcttattgtgagaagtctacgcattactgcaatcttcaatcagattaatactgttcaaaatggctcaaaacattcgtgatttgaaagtaccaacacctgcagctgagctgccaggtcatgtcctcgattttttcaaactcaagggtagagtggcatctgtgacaggtgcaagtggtggtattggttatgaagttgcccttggttttgcacaggccggtgccgatgtcgccatgtggtacaattccaatccaaagatcgaagaggaagttggtgagttgtccaagaaatacggtgttaagattaaggcctacaaatgttccgtgactgatagtgccgacgttgaacgaactgttgatcagatcgtgaaggatttcggcaggattgatattcaagttgctaacgctggtgttggttggaatagaggtcctatactcgactaccttgaggaagccggtagagaagctcttgacaaggagtggaataaagttattgatgtggatttcaacagtgtttactatgtggcaagggctaccggtaaacatttcaagaagcaaggaaatggttccttgattctaacggcatcgatttctggtcagatcgtgaacattcctcagatgcaagccgcttataactcagctaaggctggtgtcatccatctgggtagatccctatcaatggaatgggcaggttttgccagagttaacacagtttctcctggttacattgagactcctctgacagaccgtctttctcaagaattgcgtgatcgctggatcgagtatgtcccattgggtagactagccaacccaagagaactggttggtgcatacttgtatttggcatctgacgcttctacttatgtaactggtaccgatattcgtgtggacggtggttactgtgcattttaagatctgtatgtagactcgaatagccaataaatggcgcaattttatgcggttatgtcatgtaataaggaaataaaattgtttgctcgtcggagttcggacttgtggatttgggctgtgatagcctgtggtagcctgtagagtgaacgcggggggagccacgttgtatcacgtggtattcgtgtgctcttctttttccaatatctcgatatcaaaaggtcctgggattgattaccgataagattaggacttggacaccagtgaaggggtgaagggaaactatgctcaaagaagttagctaggatagttgatgtgtggtttacttatcggggtttatgatggtatggtaggatgcgtttatcgtggtaatgatttgctgttatccaaaagattttggcaaattgattagggtcccgaggctgcctcttcggaatgttataaatgaggaccaactttattaagtgcagtaatttattccaaagcaagagtcgtaggacgtgtattttaacaaaaatgagtagaaaagaaggttctaaaattctggagtactctgaaacatgcaatttgactttgggtccagaccccctcgtgaaatttgacgttgatgatgcttttaacctaggtataatggctagatctttgattctagaaaaaataagagaagatggatatgtcatcgaaatttgttcggcagatgaccattgtctgtttcgttgttgtacttcttctgataccacagtgggcaatgactggaggctagagctaaagagacaagccgcattgaagcatagaaattcaagtttcgagctgcaaaaaaggattggaagttatatgaacagcaagcttatcaagagtacaagggcctatctgctcgaaaacaaacatactgttattaccgaaggagcagtattaatttttgtgaagggtgtgtcattccctgttggttgtttcgctattgacaaaagggatccctgtttcagaatagaacatatcgccaagtactgcctctacaggtactctcaggagcaattgcaaaagcaggaacagaaactggaactggaaatttcgaagcgggtagaagaaaaattgaagctcgacaatcctattcaaaagattgatggtgaggcttggaaactttttaaggagtagggtacgtaacttctcggtcagtcgaaaatggcaaaaagatggttgctgtgagattcgaactcacgcatcttgcgatacctgagatttcctcgcagttttcgctacgagtaagagtcgaactcttgaatcaggcgccttagaccgctcggccaaacaaccgtataatcttatgagaaaagatctttgctattattgctacaccattataacaggatcagttgatctcgatctccttctttgtatacaaaggtaatgctttctatatcatcgcattacactgctatatagtatctgcctcaatcgaggaattgcttctgattgaacgattgtatcacgcgatgatcggatatcatcactaacgaaatatttggttttggaatgtcttccaagctgactgttgacactctcacacgaccaacaagaaaaatgacaaaccgaatatactcagtctatctttcaaccgatagatatgaggaattgtaatcaattactcccaacaaggagttttaaccctaccagaatgattcatcaaatggcaccatgggtgcctacatttattcaatctaccaaaaacaatcccaaaccatttttaccgttccagctggcgactgtagatgtccataccaataaacctcgttgtaggacattagtctttcgagactttttattcatggataaaaggtcaaatgttcttacttttcatatagatttgagaagtaacaaagttgctgaatcctttagtttagacagtcctacaccagtcgaggcgtgtttttactttgctgagacaagagaacaatacagatttagtgggcattgcttcttaataacgaaaagaaaccatagtgaaattccacaagatgtcactcatagatatggaatcatttcaccatcagtttgcggtcatcataaagacgaattgtacaaatttgcaactgaagatgaaagacaacattctactgataacagcaacagacaggaaagagtcctttcccagggtgattttaagccaccgctagagcaggagtggggaatggaactcaaaagacagtggtcccgtttatcaagatcttccaaatctcaatatcgtaagccaaaccctggtaccgaattgactactcagagtagtaatctgttggataaaatcaatagaggtgtggatggatcaaaggaggaaactggtctagaaaattttgccattgcttgtatatgtgttgacgaagtggattatctgaacctaacaagtggttccggtgatgaaagagtaatcttttcaagaagtgttgagggtggtactgagaactgggatgagaaacacgtatgtccatgatattacgccaaatgtgtttataatagtaatatgatgatgtagaacgatttaatgcgaatatatatataatggtaaggctaatattttacgatgaataaatcgcttttaattattttttttcattccccacaatgttttctaacggcgtcacactgacaccaaaatgaataagaataattaaaataattaaaaccaaatggataggttaaacaactagcagaatcttttatgagtgaatgctacaggcttattagactttcctctttcaatataactatcatttcccaattactacaaatatacatggtcatacttaaaagtccgccaatcggctagcaattgatatcagtgttcattttgccccacagagtttatcccgctgcttgtcccatgtattatctattaggatgaaggcttttatttcaatttgaatatactatgactttccgatcagcgggttcgattcccgcgcggtagctaaagtgaaaaaaataataaaggaatagtcaataccgcagataaaggaatataaagggtaagacgatctaatggagaagtagtcttaagaattccttaaaccgtcagtagtatattgtatcctattcgatcaacaaccacgtatcactaatgctaagggttagacaagctgcaacaaagactaaggggatggcccctaggtatttaaatggcgccgattccactgccaggagaactcttttggtccctactagaaattttcaaaccagtaccatcagaatgagtgttacttctaaatattaccctaatgaacctaccaagcctttggttaaaactgaatctattccaggtcccatatcaaagaaagaaattgctgaactagataaggtatttgacgctagacctgcatactttgttgctgattatgaaaaatctctaggcaactacattgcagatgtggatggtaatctttatctggatctatatgcacaaattgcgtcgattgcactaggttataacaatcctgctttaatcaaggccgctcaatctcaagaaatgatcagagcactggtggatcgtcctgcattggctaatttcccctctaaggatttaactaattcattgagcaagcttttgaaatttgctcccaagggtcaagatcatgtttggcctgcactatcaggtgcagatgccaatgagttagcctttaaagctgcattcatgtttcgtcagtctcacgagagaggttatgatactgaatttagcaaggaggaaaatgactctgtaatggataatcaagctccaggttctccacagttatctgttttatcatttagaagagcattccatggtagattatttgcttctggatcatccaccaattctaaacctttacacaaattagatttcccagcatttgattggccccatgctgaatatccaacctataaattcccactagaggaaaatgaagctgctaaccgcgcagaggatgatcgttgtctaaagcaagtggaggatttgattgtcacttggaagaatccagtcgccgctcttatcgtcgaaccaattcaatctgaaggtggtgataaccatgcaagcaaatatttcctacaaagtttgagagacattactttaaagcataacgtcgtttacatcatcgatgaggtgcaaacaggtgttggtgcaactggtaaattctggtgtcatgagtatgcggatattcagccacctgttgacttggttacattttctaagaaatttcaaagtgctggctacttttttcacgatcctaaatttatccctaataaaccttacagacagttcaacacctggtgtggtgaaccagctaggttgttaattgcaggtgccattggtgatgaaatcgttaacaagggtcttttggaacaagtccaacgtgtgggtaaatatctattcggtaaattggaacagttgcaaaagcagtatcctgacaaattgcaaaatttaagaggtaaagatagaggtacttttatcgcctgggatttacctaccggggaacaaagagatttactactaaagaaattgaaattaaacggctgtaacgtaggcggttgctctacaagctccgtcagattaagaccttcattgacatttgaagagaagcatgctgatatctttgtagatgccttgactaaatcaattaaggaattgtgaagtagatgatatgcgaatgtacataggctttattacctaaattttatggatttttttttggaattttggtccatgtttgggcacaatagaggtaaatatcaaacagaatattttcaatacttttaatagcttcgtatgattcttaggctcgtcggctctatgataatcactctgtacgcgaacgcgcttctaaggttggcaggctggaggagtgaaatcaacatcgaggcaatagcaggtagaaaacctcttcctggtacagttagtcaaaataaaatataataaattttgagaagcattgttagaagagccatatgtctgacgttgaagttttgcttactgttggtaagctggatgcctcactggctcttttaaccacacaagatcaccatgttattgaattccccacgatgttattaccagacaatgtgaaggcaggatcaattgttaaactatctgtgtctcagaatttggaagaggagaaaagacagcgtagactgtttaaagatattcaaatgaagattttggagaaatacggtactgagaagcctgaggcgccagtcttaaagattgttaacgttactcaaacgagttgtgttctcgcttgggatcccttgtcattagggtcagcacgtttaaaatctttgattctttacagacaaggtgtacgttcaatggtgattccatcgccattgaagactacaacgaccaagatttctgggttatcagtggatacagattatgaatttcaattgaaattatcgacgacttcaggtcaatattggtctgaaaaagttaagatgcatactcacaagatgaccgacatgtctggtattacagtatgtcttggagccttggatccattacaaaacgtttcagatgaacaaattgcacaatctttacaaaagattggagctagaccaatgcaaaagcatgcggctattgataccacccactttgtcactaacgaagttgacaatgaggatgatcctgaattggttagagccaagagtagtaatatacccattgttcgtcctgaatgggtcagagcttgtgaaattgaaaggcgtatagttggtgtgagaggattttatttggatgcagatcctggtattttgaaaagttatcaattccccaaggtcaatggttctaaagtgaaatttgctgataaagctgaaacgatgggtgagaagaaggaggaagaacctaagaaggaagctgaagaacctaagatagaggctgaagaacctaagaaggaagttgaagagcccaagaaagaaactgaagaaccaaagacagaaggatataccaagcaagaagaagagattaaggagcaacagactgaaaaggaagtgagtgaagctaaagaagatgttaatacggataaactaaatgaagcgggcgaagcggcaacggaaactacaacagaagttaaagaagatgctcctcaaggtgatcaaaacgtctctgaagccaagaaggaggaggaacctgctcaagtgccagaaactaatgagaaggttgtagaggaagctaaaccagaagtagatgcaacgatacaggctaacaaggagcctgaagcatctcaagccggagctcaagctgaagccgtgagttcggaggcagctgagcccaaggaggcatctactgaagaaaagttagatgtaactgaagctaaggaagcaacgaaaccagaagaaactaaggaggagaccattgaggcaaagtcgggtactcaggaagaggcacctgaagctgttgaggaaaagccagatgcatctgacgctaaaccagaggaagctaaaaatgagaccgcagatgaaaagacaggagcaaacgaagctgctgagttaaagccagatgaggccaagaaagatacctccgaagtaaaaccagatgaggtcgaagaaaaaactacagaggcaaaacctgaggaagtcaaagctgaaactgctgcagttcagcccgaggaatccaatcaagaagagtctaaagctgaagttactcccgaatctaacgctgacgaatccaaggaatctccaaaggaatctcaaccagaaacggcagaaaccaaaccttcagaaacgcaagataacctcgaaacttcccagccgaaaaccgaatcccaggaggctacacccgaaccctcttcacaggagaatactcaaactccaacaccaaagcctacaccaagtgcaggtagtggtaacagtaagaagaacaagaagaagaataagaataagaagaaataagcccgtatgtaacatatatgaaataatccctgtacacttttttatcaattcaattataatataaacagagtacaaacattattcaccgtataacctcctaactcttttcaaaacgctatccttttcaggatcgtaaggatgatccttcgatgggatctctaaaacagcagggaatgcggatgtaaacccatccaaatcgcttctaatcaattctgcaatgtgttgattgatcaaaaggatggcaacatcatctctatcctttgtaaatttatcaaatgcctgccttacatcttctcttgttgtcttaccttcttgatacacaaagaaattcttatcttgagtttccggggtgatctgacctacaccagctagtagaagacctgtgttagtgtcttcatcagcgatcgttgctatcaatgtcctcttgtcagtcatttcccttgtcctttttggcctacagtgtaacgactcttgttattgacaagtccgcgttgtaaaaccttggccttaaaacaagataaacggcagtaaaaggtggtaatggatgtagtaaaagttttgaaaggtatcatttgtgatggcgctatcaagtgaatgcatactattatgatagaatctacatagacatgaatcttcttggagatgcacgtgttatttgcgtgattaccagtacaaagcttgaggggcagagctatcagcagctctgggtccaaatatctatcttctgcttgatatcaatgttttatatagatgtatcttttgatcttgaaggtttgttttcaatgcgaatttcattgtttctccatccattgacaaaacgtaaaaagggaacactacacgaagagaaaacacacatgttattgtacttaaatctctctctctctcgatacttcaagagactcaattgaatcctaatggaacctttgcagtccctctacactttcaccaattagccgccgaagtgtttgttacccggactgttaactttttcaacatcgaggcacattgaacatgtagcatacaaaatagctattaaactcatctcagggaggacagactacacaaaccaccaggatgattgggtccacgctacggaatttaccagcgatctctcctaaacgttgctccccccgtttccttcacactaccgccatccaactctccggtcataacaaatggtcaacaatcaagcacgataaggctaaaaatgattcacaaaagaataaactgttctcacaattcgcacaacggatatccattgctgttaaacaaggaggatcgacagatccaaatataaacatgagactggcaacagcgctagaacaggctcaaaagaataacgttacgaaaaaagtcattgaaaatgcaattcgcaagggctcaggtgtacctgcacctggtgaaaaaccaactgagtcatgtatctatgagggaattggacccggtggtatctcctatgtcgtcgaagcgctaactgacaataaaaatcgtacaatttcattggtaagaagtgcatttaacaaagctggtgggtcgatgaccccgactttgtactgttttcaaagacgcggatttgttaatattctatcacccaagggaatggatgaagagcaggtcattatgacaatcttagatgtagaaggcgtagaagactacagtgagatggatgatgtcgaattaggtgaaggcgaatacggcggatcctttgttgtatttaccaaaccatcagacgctaacaaagtggctcaaagactgaaggagagtaaattctacgttgatgacgttggtgttgaattcaatgcgcaagatccaattggtagtacactcaaggaagaagaattaagagcaaatgactccctagaaaacgcactagatgatatcgaagaagttacagacgtttatacaaatagaggttagagaaaaacgaaacttgtaaatagtacatgagcgagaaaagcgaaaagaaaaaaagaattccgatacggggagtcgaaccccggtctccacggtgagagcgtgatgtgatagccgttacactacatcggattaaaaattccgatagatcttcaggagcaagccagctttgaattcctaaacaagctgctagtattttttttttttgacacagcactggtttcaatccaggcacgttttcctagatgaaccccatttgaaacaagactgcgacacatcaccctgtttatatttagcaaccgtaaacaccagccgatatttcccgatacagaacaaatgatgcaacacagctctaccacacacgtgaataaagcacgataaaattcgcgacgcgtctgtcactacggacgagaattagattcaatttcgcctcgttttcttttttccgccattttttctcgatcttttttattttttttccagtttttaactcccatccgttgcaggttcctgctgcttttctctgctggttttactatgctactacttttaccaccgttgttcttattattactgctaaaaccataataccaagatatacagggaaaataaaaccaatccaaaattcattcaaaattattcattcgatcctttccttaaatctttaacaacctttacttctgtatcacgacggtatcgatcgcaggaaagatagagagtcatacactctcataaggattctaatttggaccaaatctttaagactcatacacagatccatataagattaagaagttttacgcaacagtgcatacgctatagatacattatacacacattcgttcagtacaattaggctcgttcgctaaagatgaacctctcagcactcgttatattgctgctactatcgctaaccgacagagtatggtcccaaggtgaattcggtggatttaaccctaataatagctctttgtcgtcaaaccagcaaccaacatctactggtccatcgtcaccaactcaaagttcctcaatcacaagcactggcggaagtaggagcgatcctttcagttctgcaagcagtagtgatagcccgagcggtgttaccagtagtacgctgccaagttccgattcaagtgactctagcagtggttctttgtcacagacttctacacaaccaagtgcgacgggaacttctagctcagctcctcagagttccagctcacctgaaagttccaattcagtttcgcagagttcaagtggcttttcaagtggttctagttcaggaataacaagttcaagctcaggttttagcacttcatcaagtccaagcggttcaagttcagtaccaagaagttcaagttccggttctagtacaccttcgagttcttcggcagtttcttcgagtggaaccagctcctccagtgcgagcggatcgagttcgtctagacccagtggatcgagttcctccagtgcgagcggatcgagttcttctagaccaagcggatcgagttcatccagtgcaagtacatccagttcagccccttcgagcagtagtgccagcagttcaagctctagtgtctctagtagtacaagtaacagtgggtccagttcaagtagtagtcgatcgagtagtggcagtagctccagtagcagtagtcaatctagcagtgctagcagtgctagcagttctagttctcagagctcatcgtctgcttctagttccagttcaatttcaccatcgtcgacatcttcgctgccctcaagcactagtagctcatcaacctcatcgtcgtcgtcatcatcatcaaggtcatcatcacaaacttcttccacacaagcaccttcctcaaaaacttcagagagtaaccccaaaaaacatacccttaccagtgtggtcgatggtcaaacaattctttccaattactatactactgtaacgcagaaggcgacaggaagcagtggtttaaatgcccaaaataaaagtcatagtggtctttctcataaaaacagaaatatcgttattggctgttgtgttggtattggtgtaccattgttagttacgattggtgtcctcatttacatgttttgcgttagatcaagagaaaccgattttattgattcagatggtaaagtcgttaccgcatatcgtgctaatattttgacaaaattatggtatgcaatgctgggtaaggacatcagtaacaaatatgaatccaattcgccattaggtaataacggttcaccaattttacatgatgatgatttacgttcgttgagtacggctagtgatgaggacgattaccatggaagtgaactaaacggttatgtttcaagtaattatacttcaaatttcaatgatacccctcaacgtttggacacttcttcgctagcagaaggaactacacaagcgcataacccacaaaatttgacgttacaggaacggttttatgacgaacatggaaatgagataaacgcaagaggttactaataatatattttttcgattttttttttttccttcaccgaattcgattatgctatattctacttctcattccccaagttcaccttgtttggttgtttttttcacttcactttcaatcccatttttttattcgagcatagataccctttcgtcattaaccgcatgcataaaatgtataatactggcaccaacaaaaaagaacttctaactgagaaaacctaattcaacttgtattctcaaatggtggagataaggtttagatttaaatatataatttaataatgtcgttgcaattggtttcaaagttgttggcaggaaggtctactagatagcctgtacgatttcccactcatgttgtgcagtataagctgatcgcctggctaatgagccaagcgttgataaggacactatcttcttttcttagtaaatggtgtgccattctggtgaagcaacctagaaaaggaagactattcttgaccctaaggcgtgcgtctccacgagaggtgaatcctattgttaggatgcttgaaaaaagcttctggaacgcactttgctcccgttccccttagataaccaccgatggtatacctggcttgattgcatgtttttcaacctttttcaactaagcccttcaagtgcagaggtttgtattaccaccgttctgatagtaggtgagaatccctcaattatacactcaaaatcagtaaaatacatcctgcttcatttcaaagggcctttgtttagtcttcgattataatcaagtaattcttttagcgctcatctccattgtgcttccacccgtcttttcattctctcttcaaagggtcggaatcatctcatgattcaatagttttggaaatatgctagaaaagcaagaatgtcaattgtatacatgctgtgacacccacattgtaccaaccgctggctagttgggatattctacagaagggtcatatcttcagacaggaacacataatgtgcagccaagaaaaccgggttgtaagtaagataagatcctagtagtaaagttagcgctcagctgaatactcgagtgatcctctctcgtatccaacaaaactcatatatgctgagagcacagcttcttcatatagttcagaaatgttccacatgatgtttacgtacacatatgatacaccgcatataactcattctccaataacaagtaatccgtgatagtttaatggttagaatgggcgcttgtcgcgtgccagatcggggttcaattccccgtcgcggaggtttattttttattcctcaccttgataatacagaacttctgatctggtgtctatcaagtttttacatcgataattactctactgtaatgcttttaaaactatttagtacccttcaaacaattcgtctatcttctttataacgtcaatgtgcaaaatttcaccctttctagttactagtgaacccttcttaaacatttcaggttcattattatagttaataccacactctgagaataaaatttcttgcttttcactgctaaccgtaccactcaatttattctcagcttctctcgtcgtcaatccacatttctgaaccaattgccaaaatacagtgttgtaaagattgttaatgtgcgtatctacaaacctccacgataagtaatccttaatacacttcaaatttggatatgaaacgcaccttgaatcgaaaaacggcagatgtttaacatccaatggatcattaggaaaaaatttggaccaaagcataacatattgggatgtaaatagtgatacgaataacgatgaaattttatcaattcgtctattgtacaaagtagtatcgcttcgtagtatgaaagagtactcatcactctcaccatatgccagtataacctcactacggtattgcaaaagcacatttttcgcacatgcattcatcaatttcaatgccctcatatcattgggcttctcgaacttgtagtaattagaaaattcatggaacttcttaccatcgattcttactacgatataagtttcaggtataaggacatccctttgttcaaaatccctaacgtattcgaatcttgatttagccatttgactatttattttcaatgggggcgatgagctcaaatgttctctgcatagtttcgaagttcggtagcatttgatacatttttcaacacgataaatgaaagacttcaataaaacaaacaaacaattaacaaacgatagggataagcaatacaaggataaagctttagggatctatctactgccataatgactcaagttcaaattatcagaaagaaagatcttaagaagaagcgtgatccattgaaagaccagaaaaccgtttggttggtaggccattgtatggcagtgggatttggtctgctcttcacagtaacttatctcttccacgttttactgttctacaagtatcgtagttggaaatggttgttcctcagatttaacaaggactatcacttcatcgctggtaatagatggtaccactcaattataagatttttacctcgtgtcttctatagaatggcacttgtcggttcaattttggcattgagtgttactatgtatcaaaattgggcaagtattaatccacaatggtacgaaatgctaagttctgaaaatttccaaatgataattgttgcaacactttggctccttgtagggagaagatcattttataggctgttcccttatatgattctaagttttattcatttgagtaattggaaagaagaaactaagggaactatgagttcagacaaagttacaaagagaaatgtcttcctgttgagaattatgtcatattcagaattggtagtccttttagcacttgtgctagattctgttcttttgaaagatggtacttcaggaatatgcctcgtaatttatttcgcattctactggttacgcttcaatttttcaccttatgcacaagctactgcccttgatgtattgggccatttggaccaccacgtcccaccaaaattcagaccccaatgggacaaaatcaaggaatttatccatgctaaggacgaagcacgtattagaagaaaaggtaatattcaaaagacagcttaagtttttaatacatatcaagaaacaaggtaaaggttcagctattttgagctttggtaattggttttcttccttctgtggttcagaagcagaactgaatgtaaatttttttcatcatacctttataatacgttgataactaaaaattcaaaagaatctataatttttatcagatggtgatgcatgattgctcctagcacatattcaattgaatcatcgccagagtactggtggataagtttcatcaagtaattttctctttgaataaatattatcaacgttgtaccatgaactcatggtaaccaacggaggaaagaggatcccatcataaacgaagaattccttaactatttgtcctgcatatacatcctcagtggaaagatgaaaaaaaaaattggttctaatcttgtgggattcctttcctgggagactagaagaaaagtagtaagaagtagaagtagaagagttgaaaccaacacgtctcttatatacaaattttcagaacgacgaagaaaaaaaaaagacaacgaaaaaatcagaaaaaacgatggcccacaatcatcaaacggcatcgtacgggatctcatgatgttctcccgccagagaagtggatatttcgtcaaactacgataaaaaaaaggttatgcaatatttcgtaatgattgagatatacacctataaatttaatatatcagatttagcttattcagcggtagctctagtgtagatagcttgcttggagtgcttggagactggcttgataacaccttcgctttccaaatgtctcaaagcaacacgagccaaagaaccaccaacctttaatctgtcaacaagaacagagacggagacgtatctgtaacttggaacgtccttcatcattctgtcgtatttgtcttggtcaaagatgacagcgtgttgggccttgtccttgtgggacttctttgaccacttcttcttggacttcttaccaccggccatagcggcggcagccttttgagccttggacaactgttgctttggaggcatgattagctaccctattctcttgattgtcttaagttttcaaataaaaggatattgtaaaaagtacagttccaagttaatagtaataccctcctaagttagtttagtcttcccggatgattgacaaagttggtgaaaatttctggaaaattgagtcggtcagtttctttgcgtcggttcgcgtcgtcggaaagtctagaaaaacttactttcccagcgaaagaaaaaaaagtagaaccagtcatccaagagtttttttctgtgacagaggagaatgtacgggtggaggtgttcgggtggaatagtcacttattgacaatcacatgcatctaggtactaaatagccctggaatggaacagatgtacgcgcataatctcatacgttttagaaatccaattttcaatattttttgcatgcctttagtattttattgtgaaaagaatatgatgggggttcgctgatgtgtaccgtatatgttatcttcctaccacaacaactaataatccgatgtagtgtaacggctatcacatcacgctttcaccgtggagaccggggttcgactccccgtatcggaattcttttttccttctcactactatgaaaacccaataaggttagctatgaaaaaaaaaaccttttgcaagacaacatgaacaagaactaaaactttagtgaaaaactgtttataccaaatcgaaacaggatttacccattcatatcggccctaattggcttcaaattttctttttagtacatcattttccttctagattatggccaagagaatagctgattcccaaatcacaagagaaacgtttagagaagagggttcagattctgacaatgaaaatggttcttcctcaacaagtcatggggttgcacctgcatctgttatgagtaagcgtaaaattgcaatgcctaagaggaaaggtgccggaggtttcaattttcaaccaaaaccatcgaatgtggataataataataataataataaaccatcagcggaatctcagatgtctaatgcatttaatatctttaaaaaaacacaacccaatgataatggtaccaacaatgatacaaacgctaagcttaaagctcttaatctgcaatttaaggataaagtggtagaaatagtaaacaaggattcattcgcagatttgcgtccagctttggataaatataagcaatacattgaaccactaaaagtagagaaacctttaccaccaattgcaaaatctaacgaaagtgataaaaaagaggaagttgcctcatcttcagaggacgaagaggaaattaaagtagaaggtccaaaatttactgtacaatcaaaaccaactacttcaaattcggttttttcatttggtgctaagaaagcagaacctaagcgtgctagtgaaagcgacagtgaagatgaaattgaaattaaaggtccgcaatttacgtttaatggtgaagttaaaagtgatatctttaaattgaataaaccagctgaagaaaaaaaggaaaatcaaccacctgctaatcctttccaacaaaaagactccgaatcatccttagcgaatttagctaaaccagcatctagttttggtaatacaaatactgatactaccaaaccacttttcaattttggtcaatcaaattctcaagaggagccaccaaagaaaccaacattcagtttcggtcaaccaagctctgaaggtgagccaccaaagaaaccagcattcagtttcggtcaaccaaagcctgaagaagaagcagcaaagaagccaacattcagtttcggtcaaccaaagcctgaagacggaacatcaaagaagccatcattcaatttcggtcaaccaaagcctgaagaagaagcagcaaagaagccatcatttagctttggtttcaaaccaagtacacctgcatctgatgcatcagaaaagagcgataacaaatcatcattttcatttaaattcggtcaagagaagccacaaaaggattcacaggctgaaaaccctaaaccaattttctcatttggtaatccagctccagctgccaatggtgaaaagaaagctgatgcaaagccagcgttttcgtttggttcatcgaattcttctactgcaccatctttcagtttccctaaaccaaataataccaacgatagcgacagcaatggaactactacaacgaatactgataatgctccaagcggtggcttcaagttttcactaccatttagtcagaaacccgcaagtcaaacttcaccttcatcatcattatctgcaacccctcaacaagaagaatctaaaccagaagaaaacaaggaggaaccatcaaatccaattgaaatgcaaaatggtgaagaaaatgaaaatttacttttctctcaaaggtcgaaattaatgatttttaataatgagactaaatcgtatgattccagaggtgtaggtgaattaaaattgttacagaacaaggaagataagtctaaagtaaggttcctttgtagatcagatggtatgggtaatattttacttaatactagtctggtaaaaagttttacttattcaccattgactcccgaaagtgaaaatttgattaaagttccagttgtagaggctcaagggaaattgaccacctacgtggctaaattcaaacagaagtcagatggacgacttctcgtgaagtccgtcgaagatgtaaaaaaagatatgtaaatgatgttttcataggaaagaaaattcgaaattgtaaactataaatacattgaaacctagtaatcgataccttccagttcttggtctaaaatatttacaaaggtaggtactgcccattctattcttctcaattccttttcatcacctttgttgcccttactaccattaaagtagtccttgtatctgaatttcttggtaacaaaccattttaatcctttcaaaattactgatctgttttccagcttgacactatcttccagaagtttacggaagccgtcgtttttgtaactgactattttattccccttgttgtccctgcttttgacttcagattttttggcaatattcacgaataattggtacaaaagaacctccatgaatgaatatccatctgcattcaaaccagacataattggaacatgtttgaagatgtccagaggtaaaattcgttcggaaattagagatccgaaaaatttcccgcgactagcaatgcttcgcagtctggcatcttcctttaagtcaccataatcatcttcctcatctatcgaatcttcttcaaactttttgattatatcccaaaataaaaactggaatgatttggctaaatgatgttgatattcacataattttcttgtaagtaatgcgtaataagcattataaccattttcagtactatcttgtactaagcaatggattataactcttggaatctcaaccaattgcttgttttttaaattcaatttttctaatctcgtaaatgcatccatgtagtcctgtgcagacattatactaacaaaaattgcacgacgaacgtctgtattcatacgttgttgtttggcaattgcctcccaattggggatatcatcgagtaaatcgtcttcgagattaatttcatcgtctgcagaagtcatctttccaggttgaccactatgcgcttcttcgaatgcatttgccatatttcccttccacgaggcacctactagccaccatttacctttagtctcgacgtttttaatatcatcaactgttacctgtaatggctcagtagatgaattcgaaatttttaatacattttgtaatattttcttcaattgttgattacttgtggctagcattgatggtttcaatctgttgtttttcaaatcagaaatagtttccaaaagaaatcgtagacgcactggttgatccttaatcgatttaacattggctagtaaatctgagatgatctctttcaatgcaaacggatcatcaccacggatcagcggtccagaaattgatataatcctcaataaaagttcagtggtgaattcattaggatcttgtacgaaaaatctaatcaaatcgtacaccagtttgcttgaaacgaatccaaaattgtaacaataggataataaggtaatcatgttactgcactccttgggaaaaacagaagggtcttcacttttcttctttgtgttacgaatagtttctaactgttggtcgtaatactttagaaaagtttccacaaatgcctgtataaagagcgcaccaacctcagttcctcttaatttccagagagagaatgctaccgcagcataattcatgataaatccatcgagcaatttattgttttgacaaataatagccaagatttccttcgttattgcatcagtggcatattgacgagcattagcatcaaataaatcatttaaagatgagattatagtggtaatgtttgaatcagacaatttgtttagggaagatttaaccgttttccttaatttggtaaattcttcagactcttcttggtctcccaactgctgtttcctcaaaaatgggggaacgtaagcaccatcattttgagctggcgcgacgtatggattttctttcaccttcttcttgctcgatttatgttccatttcatcgctttcatcctcttcatccaagggttcatcctcgtcgtcaaagtcacccgaagataaatcatcatcggaagaaaatagcttttgaccatcatcctcttctgataaagattcctcttcctcctcttcatcattcgattgtccatcttgttcttcttcctcttcttcagaatcgtcttcagactcgtcttcgtcttcttcagagccgctctcatcttgatcacttctttccccgttttcaaaattttcgaagaaatctaaaccttctaatagtccaccaactgcatcaaattcatctcttgcatggatctttttatttttccctctcaatcccaattttttggcatagtaggccatttccatttcatctctttctatagcttcacgttcagctgacgttaccgggggacggtcgtgttgttttgatctcttggactccttcttagatgccttggcctcttttaatgctttcatagtctcttcggcatccataggctcctcatcatctccatcactcggtacctcatgaccttcgaaatcacttgcagatagctcatcgtctgatgagaaaggcaagtctggcttttcggtctgtttatccttgggtttcgatgctttcgtgttcgatttatggttaactttatccttcttctcacgtctttgttgctttctagcttctttcctactcatttgtcccttggcatttctcttcttgcctctactcttcgtagtagtattgaaccgctcatcgttggtataatcatgagtctttagctcatccaacagagtccctgggaatcttatagcgtggccaccagacatcaaatcgacctacttcttgtagttttctttcacaatagatgtagtataagtgtctaagctcatcgctaaaatttttgatcaataaatttatacagtgcacaatgacatgcacaaataagaaattcattaagcttttgaatcatatataaagttgttttcaatctctgaaatgtcaaggaaatttgatttgaagactattgctgatctttcagtgctcgttggtactggtatatcgctatattatttgatcagtaggctattgaatgatgtggaaacaggacctctatcaggtagatcgaaagaatctaagagtagacaattatcacagtggcagaaacttgttgataagaagcctgaactagcaaaagtggatttaaactcgtatgagaaaagcgttttgtcatcagtgataacttctgatgaattggacatatcatttgaagatattggtggacttgatcccataattgctgatttacatgagagtgttgtttatccattaatgatgccagaagtttaccagggaaatccacttttacaggcacctagtggtgttctattgcatggtccgcctggttgtggtaagacaatgcttgctaaggcgctggcacatgaaagtggagctaacttcatttcaataaggatgtcacaaattatggacaaatggtatggtgaatctaataaaattgtcgatgcaatgttttcgttagcaaataaactacaaccctgtatgatttttattgatgagatagattccttcctgagggagcgtgcagctacagaccatgaagtgacagctatgctcaaggcggaatttatgacactttgggacggtttattgggtaatggtagagttatgattgtgggggccaccaatagaattggtgacatagacggtgcatttttaagaaggttaccaaagaggttctacatttcagcacctaataaagaacagcgtttaagaattttgaaagttttattaaaggatactaaagtggacgaggagaactttgacattgatgtcattgcagcaggtacaagtggtctttcagggtcagatctgaaagaattgtgcagagaagcagctttaagcgctgctagggagtatataagattgaaaagagaatttatggttaatttcaaatcaaatgaactaccagacgatgtctccatagagatgcgaccattgaggacttcagattttgcgccgcacttaaagttggatgctcaacaacccattcaggcaatggcattggattaaagaaatatggtatataaaagcttttgcttttaggcaatccctttacttaacatgttcccatactctgtagataaacttttttaatgttcctttattaggtgtcttactatttaaagatgaattatttgatacaagatcgtaagcatctattgttgacttacacacagtacaagatcgagctaaatggctaattctcaaccccaagaaggtgtctccgggaggaagattatatacgatgaggacggcaaaccgtatgatgcattatcaccagttattctattttttcctttagttcctacgaattgtatgttactaacgtaatcatcgatcaaaattagatgtcgctcttgcaatactttactagattttcaatttgcgactggtaagatatctggtaaaagagctgcctccgctactggtgctgcctcttctaactcagctggctccttgggacccactgctactgaaaagatacctggttccaagacgcatgcgaagggtgatccaccagatgtcgaggttctaggtagatcatcatggaatctactgcacaccatttccgcaaactatccgactaaaccttctgacaggcaaaaatctgaaatgaaacagtttctacaactcttttcccacatatacccttgttcgtggtgtgcatctgatttcgagcgatacttaagagaccatgcaccaaaattgggatctagagatgaatttggtagatggatgtgtgatgcgcataatgaggtgaatgttaaattgaacaaagagacttttgattgtaatttctggcagaaaagatggaaagacggttgggatgagtaaaatgcccatacaagaacatgtaaataatattttaagatacaatcggttggttacaattcactagtcattaatatactttataccgagtcgtgaagcccccgacaactttgatttgttttggttatgtctttacttcgtaactgtgtatataaaaaaagtattcctggtcttcaagagtattggctcaaatttagagggacactagaacctttaccgcttgggtataatttagtcttaccttggaacattggaggtttgggtatctgagacgcatttatccatttaaatctcgaatcgttgacttgaagtctattgctagaagaacggtttccatttatcgtaacatttcccacatctacatctggagaattagtatgatcgttagtgttacgtctaagttttgacgaccctgatgagaataatctttgtttcaagttgtgaccagtttcaccaaaagatgaaggaccagcagatggtgatggtggtggtggtggcgctcttctgcttgcttcttcggaatatgaggaagatgtggaaattgggggtggaggtggagcagttggcttccttggagccgatgtaccaggcagaggtggtgcagaagttgaaggaggtgtagggggagccggaggagccggaggagctgatggtggtgatggggctgatggggctgaaggtacaggaggcgccgatgaagaaggcgtcgatggaatgcgtgatgatacatttttgggtggttttgatggtttcgatggggtcgccggagggactggtggagctgatgcagtgggtagtggtggagctggtgccgccggtgaaggtggtgcaggggctggagctggagctggagctgatgaagctgaccgtggacctgagctttgttggtgctttagtttattttgaatctcacccaagaaagacattccaccaccactacttccacctgaaagcggttcagccttcggcacattaagagctgaatcagcggccgagctaccagcgcccacgtcctcttgatctgccgcggtactatatcctgaattaccatcaacaacaaatctatcgtctcttttcttttgaatttcagccaaaaatggcaaaggcccaccagatgcaggtacggctgtattctcttttttgcccggtcccttcgaaggtctgtttggggtagaagctgccaaaaaaggtggtggtggtggtggtcccccaccagaacttgaaggtggcgctggcggtgctggcggtgctggcggtgctggcggtgctggcggtgctggtggggccgggggtgctggtggtgggggaggaactgatgatgcagaaggcgctggtggtgctggtggtgctggtgcggatggtgctggtggtgctggtgcggatggtggtgctggtggtgcagtaatttcggacttcttgatagactttagtctagtgggtcttgcactaggcagtttaggtgcactaggaactgaaggggcgcctggtctcgtagtaggaaccggcggtgcagaagcctgaggaaccggcggtgccgctgaaggcaaaggaggtgcagtcgatggaggaggcgctgggggcgctggaggcgcagaaggtgccctagcagatgaaccatcaccactgctcaaaccttcagtagcacctctatctgatcttctggcattaatctctcctaggaatggcaatccacccggcataggaggtgctggaggaggtgatgataagctactcgaagaagcagccactggaggaggggttggtggtgggggaggcgccgacattgatggggctggaggtgctggtgcggctggtggtggtggtggtgcacctggaacaggaggtgccgaagctactggtggtttgggggcgcctgtggaaccagattttctatgcatgctacctctttgaggtcttgtgggaacagagggtattggcgctgatgggatctgaggtgcagctgttggtggaacaggaggccttggcgccccagtcgatggtggtctaggaatccttggtgtaccaattggtgattttggaattggtggagcaccagctgcgggtggactaggagctgaagatcccttgcttactggcttcaatttagatataccaccggctagaatatctcccaattgtggagctcccgtagggattggaggcgctgataaaccactaggaggtggtgcgccgcttccactacttccagatgattctactgcaccaccgcccactttaggagcacttctatcatttgtctcggcatgtttcaatctagcacccttcctaatatcagctaacatagcatctcttccttgcattggagaggttggtggtttgggagcagagcgacctccgcccattggtggaggcggaggtggtggaggagctggaggtcctgccatgatttcaatagatcttatgtttgatctgattttggcaacgtattttatgtgaatccatttcgagtctaatctttaaatttattgcccctttcccgaaccgttatacgtatatagtgatgtgattatcaatatataaaggatgaaaatctttaaaaccaacttgtaaacttcttctttctacttttgccgccgaaaaagagtagtatggcatagagatcgacgattcttggtagtgaccgagttcttcaatctctttaatcttataaaatatagatggcttcttcgaagatccattgactttggctcttaggggtctggtggtctctggattcaaagcgaagccaagaagaaatgtgcatattgttttttaccttttaaaacagtatctcaatgggcttggtttgggaagtgagtttttttttctctgactcatttccttctgctcagtgatacaatttaaattaaacgaaaagaatattaatcttattaatttgccatacgtagttttttatgctgttctatgatattcattaaaggtggcccccactcatctctgcccttgtatgtccccaggatatgattcatatcgctaatggctctttccagttcatcaatgatatgtggttgattgtagaaattgttagctagccattgatctctaaaattccataaataagttctaacaccaaatacaattgtatcactgccgttaggagtagaaaattttgttaaagtctgtctctcagatctgtagtgaacatctttcccaccatgtaattcatctaatgaacgtgctctcgaatctgtgaattttttctgtgcgtagagcatgtcatggttttggaaagtataattgaccctattggctaaggcataaggtttcaaatgggcaaggaatttgttcatttgtgattgtaaatctctcttatattctggtactggaccatgaaccagtgtcaatggttttaaaaatctattacgagggttaaatccagcagcaaatccaaaaagacctgacagcataatgtattcaccgttgtactgtttacgttcgttgcgcgacaacagtagtaaatcgtcttctaccaaacggcccattgccaaaattagttcatgagcacgtcttgttctgtcacaggatatcagaaccctgtaaccaatttcatcttcctttatgtgtaaatctttggtcaacttatcaggaataatatcagtgttgaaacaacgataattgatacacaaaggagaatcgttagccaattgcaaataacgattgggatcaaccgggtgatattcattcaaaacggagttatatagggcacctggagtttcacctggactcaataccacatggaaatattgtgggaacttgcatgccaaataattgattacattactgtacacttcacaaagaccttgatctgcttgttctacatccttgggagaaataacaattttggcatacatatcatcagttggtacattgttactttccccaccatcatcgttaatcatagcgggatcaacatggtaaactaaatcttcgtaatcagtccgtagaatttcccattttgcatcaattcgttttttgaaagttttatccataacaaaccaataattgaaaggaatagtggtaacacccatagtaagtctatgttcacccggtttaaatggtttgtaagggtatggttccgtttcatcccatcgtgtgtacttctctttttcttcttcctccacaggaaccacttgttctctaattttcctcagaggtttccatttggaaatgcctatattatcatccgctgcctctttttcttcatctccttcccttgaagaggactcagtcatttttctttgagcctcttgtgtctgccttttgccatctcgaagatctctgtaaagcatccaaatcatccagaagagtgctggagtagttacttgtttgcccaaaacatgacttaaatctacaccattcatcttaccaccttacaatctgctgaatggaggtaatggaatcaaacaatctgatcctcactggccgataaaagagtcatccctttatacaatctatcaaatacaatatttcttatcattccccaatttgatagttcttatcactcctttcttgggcggggctcgagttccgaagatgcaatcacgactgtctagtaaacccctttgattccaattgaactcttgctgcaagctgatcgtcttctctaatgatgattaccagcagtatggggactcttttacgggtatgtatcaattcgttatgagtttcaactttgtttatgaaccaattcagtttgttccactggtgtaatttaacagttttgtcttctttgtagatcacctttttgtaaatttccaagatacttagcatcttttgaatgtgtggaccgtaggagaaaacacacgttatcggcgtactttctgcttgtagcttttctaccactcgtcttatactatcattttttgttaccttacgataacttatcttgctgtccatcattgatcccgctagcatatcaggtaccacatggtcttcaataaattttaaacattctgagtagtttggcaattgtaagccagtctccttattacaatattctatgacagacatattggaactagtatatatatatatatatatatgtttatgcaaattgatagatatgatgcaacgataggcaaatcctttgtttaaagagtattatatttgatacgcaatgtctgcgatgaggaagccatagttgattgttcagaaactttcaaatgactgtttttgatattgacatccgtacatgctcgggaattactaggaaagaaaaaagaattcaaagctctcttgaaaattatcgaaaaatttcatgaacgcactcaaacgacgcgctgacgcaggaggacagaccgcttcgaaccagaaaatgaaaaactacaaggtattgaatagtcgaagtagttagcaagatgtcgatttgttgataagaggcacacgaaacctttaaacatcctgcagacgttatataagtttgaaaatgggaggcattcgtgaaaagaaagttgaatacttcagcaaattgagagaatacttggaagagtacaagtccatcttcgtcgtcggtgtggacaatgtctcctctcaacaaatgcaccaagttagaagagccctaagaggcagaggtgttatcttgatgggtaagaacactatggttagaagagccgtcagaggtttcctttctgaattgccacaatacgaaaaattgttgccattcgttaagggtaacgttggtttcgtcttcaccaacgattccttgaaggacatcaaggaagttattgtcgccaacaaggttgctgctccagctagagctggtgccattgctccaggtgacatctgggttactgccatgaacactggtatggaacctggtaagacttctttcttccaagctctaggtgtcccaaccaagattgctagaggtaccattgaaatttcttccgatgttaaggtcgttgaagctggtaacagagtcggtccatctgaagctgccttgttgaacttgttgaacatctctccattcactttcggtttggttatcactcaagtttacgacgatggtcaaatcttcccagcttccatcttggatatcactgatgaagaattggttggtcacttcgtttctgctgtcaccaccattgcttccgtttccttggctgttggttacccaaccttgccatctgtcggtcacagcatcatcaactcctacaaggacttgttggccgttgctgttgcttccaaatacatctacccagagattgaggaattgcaagacagagtcgaaaacccagaaaaatacgcctctgctgctccagctgctccagccgctggtgctccagctgaagaagaagctaagccagctgaagaagaagaagagagtgacgatgacatgggtatgggtctattcgattaagcaacttagtatagtggtatagctttcatttgtatcattttatctaccttgttaattgtatttttttagactagtgttaattgggattgtgtcattgtgtcactgtcgtcggcacgccgaagtttatcagccgcacaagctaacgtagattatactgctccttcacaaagagttcgaagaattgtacatacatctatagccgttgaaagatttacatatattaccagctggcatgactttaagtttaagagacatcaatggttgcgattctagtttgttcaattaccgccatttctctaaaatttcgattttgaacgatactttacaaagaggaaataaaaagaatgatagtaatagtgatagcaatagtaatgagattcacttaggattggatcgatcattaagacaaatattcgataaacctttgaaatctaataatgaatatgaaggtgaaaattggagtgaagcggtttgcagttctaaggccagaatgatgtcagacagattattaaatattgatagtgatagtgttctcgatttttccttagcatcagctcgtaaattaaacaacttggatggttcagttcagctgtttacaccgacggtggttgctaacaatagccaattgaatttagatgaattaaatgctcacttatcattacttttacaagataccttagacattaaggaaaccgattctctattgatgaaattggggttacagttaattccacaaacggttaaactaaatcaggcgttaacaagatttgacaacgatcctaagggtaaagctaccaataaaagtgtcagcaaattcgttgagttttgtaatcaatcaattgatgaaatttggttaccatatcttgccgaagggctcaattttgtaaaacaggctctgcaagtattggaaacgtttaaggatcaatacaccaaggttgaattgaaaacaactgctgatgatggattgaaacttctaattcatcagtggtcaatgttaaattatttccctatggtattaatcaactctttaaattttaaagttttgtttccatctgaaaacattggtaactccgaaactcagatggcgctaacaaacaacgaattgttcaaaatattgttcgttacactgtcattagaaataagcaagacatttatcaaatcagttaagattttaatggatttaaaagcctacgagaagtttgaaaatagttcaattatatcaactgtggctacattactcgattcaacggttgaaactcatactggcgaaataatgattggtattggtcagttgattagagagtggatcacagaaagatctaaaatcgatcctctatgtacaattgcatggaaccaatggtctcaaagtgtattgcaagactacagaattcgtttccgtaatgatatttccgcattttcgtcgagtacagacgaaggggaagatgacgctcaattggcagaattgatgttcgataaatttgacgttggtagaatatttgtggaggaaatcttcaaatttacacaaccggaaaaaaaggcaaaacctacatttaatggcaattctctcggctggctaactatatttgatgagaatgaaaataacagtactcatggatccccaaatcgcaatggtggtgaacatctttcgcctgtctacgccaacaacacattaaggagtttattcccaccaatatcatcaagaaatgctattgtcggatctagtaatacactacgtacggctactactgcgaataactgcaagaaagccatagtcaaacaatgggcccacacattgaaacagaaatttcaagattttttccacttacatagacagccatccatcatctcatcggtacgttattatagggccgccacaaatgccgcgaaccttcataaccacgcaacccgccatctcgcaccttttcccggagatattactatattcgcggaggatcaacgctctcacgttgaaaagctgacaaaaaagctgtataagaaggaggagaagggcagacggaaaagagatgcgcttcgagtaatattcagttaattcatctttcccttattatttctatagtacaatcaagaacaccaataacaacgtaataaaatggctttgcatatgatttctttagtagagcaatctgcaatctcacaacatcatcgtcatcatcgtcatctcgctttgtgaggggcacggaatccatacacacccccactatacaacactacgtatatacccacaatatccgtctatccaaagcaaacaaccttaacattgccccgtggcgaatacctacgataaccttgataattgatagctaaacgagttctatcataataatatcacccttcttgattatcccctagggccctattaatcacccgcatttcctttttttaacatactttttaccctacctccttcatgcgaggcacggttcttgcctaactctaatttcaactacaagatataaaatctaatatcagacagatagaaggaaaaaggcaactacaaaatttcttctatcctctaggtagtttgtaactggatcggtaattgattgggaaaaatctgatgcacaataaagtgataggctctgttactgttcgtcatcacttcataaaaagtattccgattattaagaagggcatcaagggatccccgcttttaaaatttaccagatatcaccatcaaaatgctaagagacaacatgtaaagttattttcagacactgcaagtaaagatccacctacggggccactatttgaccaccacaataacacgtttgaaactactacatctcaggggaaatatggatccactgaagttttgaacaaacatctatcctcagatgatttaccttcagtagagctgtcatatgatgttattactcagcataccagccaattcgacaaggaaaagtcttcgattatccttctacatgggctttttggcaatagacagaacaacagaaccattggacgtgaactgaacgaattgttagaaagagatgtttatttaccagacttgagaaatcatggtcaaagccctcacattggtagacatgattatccttctatggccctcgatgtggaaaggcttattagagagaaaatactaaaccacaaggatgcgaagaaaccaattatagtcggtcattccatgggggcgaaagtcgcaatgagcgtcgcactgagaaagcctgaactttgttcaatgttagttagtattgacaatgctccagtcgcgtcaccaccaatgacagctttccccagatacgttagaaaactgttacaaattataaacgatcctaacgtgggaactgtacaacaagctgatgaacagttaaaggagattgaacccaccgcggttgtacggagatttttactaacggttttgcaaagagttaaagacgaagagagtggtcgttggaggtttaaatcaagaataccgctaggaatcttaaatgatgctatagttaaggggaacatttcgaattgggaatttaacccgtgggttcacagattcgtgggtccctctctattcatcagagctactaaatcctattacgtggctgatgagtacctttcagacgttggtaatttcttccccaggtttgagataagagacatcgaagctggtcattgggtcaatgcagagaaacctcacgaatgtgtacgtgatattgtggagttcgtcgagaggcaggaagacgaattaaggtttaactgagatgagcgtaacgagacgtaaacaaacaagtatatatatacatatatctactgcacactgttggtgtcctctcatatctctatgattgtatgtgtaataggtggcgttgtattattacttgtattactacttgttttactactactgctatattcagacgtcaaaggtatctcgcgggtaaccgtgcacatccaaattctccgtgcttggtacaatgtgcattctttgccgccaggctcttctctgcattgtgcaacagttagatagagtggaaaatggtcgggtatcgcaggtcgctactcaaagcacgcggagcatggtgtatggacgtttgttcttgattcttgattcttccttctatctttaatcatactcctttgtttatttttaggtttgctactacggatttttctaagtgacaagaaaaagagaacaacgcgcatgtcggctcatattaattatccgttttcggtcactgcctccgatctaatcatttcccttttcccttgacttcgcggaacccgagatgagatttaagaaacagcgtgttttgaccggggttgatctcgatcctactcttcgaaaagaaccgttccgttttcctcagcgcagtaacacataaactgctcctcgactgaatatctacgactgctagttgcagatttcaacacaaaacaaccctagaaagcttcattttgcttcttcaatagtatcgctatctgagcaagacgaagataacatacagctaaagaaatcaactaaatagaacgcagcgcgagatatctgaaaggggaaaattaattattaaaggtatgttagtaacgatttgatgcgattttatcgtaattcgaccgatatatgccactagtttcaaaaggagaatctttagacgcgttgcagatgcaacgcgtgggtttcatgggtttctacggcacattctcagtaacgcgaaactcggtccctccgcacgaacatctgaatcaggaaagtacagggccaaagtagcggatcacatacggagaaatctaggagtacaaggacatagtgggggggggcatacagaagaatacagagaaagccgtagcggtttgacaattctattctggtcagaaggcaaaggagcgtttcgccagaaactcggacaatctgggccttatattataatagaaataaatcgcgactcttgtatcttcgtgtttgtctacccatactcgaaactcgaaacccaaaacgaaaagaataaaagcccaaaggcccctcgaatcattttttttttttctttctcgcataccgtagcctttttgattgacttcggatcggatttcaaggctttaacagattctcccctccctagtggctcgcgtttttggtcgtgtctcatccaactacaattttttttcttacgcgtcacagtaatactaacgtcgagatcgtagactgaaagagaattaataaaagggaaaaataaaacaggatctttcatttacacaaatttttgtttctctaagacataacctagtcttggcaggtcaatacgaaggaaaagtcagaatatctaacaaacaacctcacattgactgtaaggacgacacaatatgtcatacggtcaaccgaaccacgaacaacaagtcccgtatgaggatgaaatgggtggttatgctccatataatcaaggttatgcggagcctatgtatgatgagtatggaaatcccatttacccagatgggacttactatgatccaaatgtgatgggtggtgatccatatgcacaatcgtccattggaccttacgatgatcagactatggattaccaatctggttattataatcaacctcgcggtcctgctatgggtgaaaatttctccgattttagcagttatggaccaccaggtactcctggttatgatgcttacggtggtgctggtgcttatacaccatctcagatgtcatatggtgaaccaggatcttcaggagcttcaactccaatctatggtactggcgaaggttacgatccacaagccattgctatggcactaccaaatgaaccttatcctgcatggacagccgataaccaatcacctgttaccatcgaacaaatcgaagatatctttatcgatttgacaaataaatttggtttccaaagagactctatgagaaacgtttttgatcagttcatgactctgctggattccagatcttcaagaatgtcaccagaacaagcattattatcagttcacgccgattatatcggtggtgatactgccaactataaaaaatggtattttgcagctcaacttgatatggatgatgccgttggtttcagaaacatgcagttgggtaaattatctagaaaggcaagaagagcaaagaagaagaataagaaggcaattcaggaagcttcctctaatccagaagagactgaagctactttgaaccaactagaaggtgataattctctagaagctgctgacttcagatggaagacaagaatgaatgagttgcatccattggaaaaagttcgtcaaattgctctttacttattatgctggggtgaagccaatcaagttagatttacagctgaatgtttgtgtttcatctacaagtgtgcttcagactatttagaatcaccattgtgccaacagcgtacagagccaatgccagagggtgattacctaaagagagtcattacacctttgtaccatttcttgagagatcaagtttatggtattgtcgatggtagattcgtcaaacgtgagaaagatcataacaaagttatcggttatgatgatgttaaccaattgttctggtatcctgaaggtatcgcaagaattgtgtttgaagatggcactagattaatcgacatcccacctgaagaacgctatggtcgtctaggtgatgtcgcttggggtaatgttttcttcaagactttcaaagaaactcgtacctggttacatttaattaccaatttcaaccgtatctgggttatccatgctacagtctactggatgtatgttgcttacagtgctcccactttttacactcataactaccaacaactggtcgacaaccatcctcccccagcttatagatgggcatcagcagcccttggtggtacgttggcaagttttattcaaattgttgcaactctgtgtgaatggagttttgttcctcgctactgggctggtgctcaacacttgtcacgtcgtttctggtttttgtgcttaatctttgccatcaatttgggtccgatcattttcgtgtttgcttatgaaaaggaaaccgttcagagtactgccgctcatgcagtggccgctgttatgttctttgttgcggtggctactttcctatttttcgcagtgatgcctcttggtgggctatttacttcctacatgaagggcagaaccagaaaatacgttgcttcccaaactttcactgcttcctttgcacctttgagaggtatggatatgtggttatcctatctggtctggattaccgttttcgccgccaagtactctgaatcttacttctttttgattctttcattgagagatcctattagaatcttatctactatgaacatgagatgtactggtgaatactggtggggtgctacactctgtagacagcagggtaaagttgtccttggtttgatgatagctacagattttattctgttcttcttggatacttacttgtggtatattttggttaatgtgatcttctctgtcggtagatccttctggttaggtatttccattttgactccatggagaaatatcttctctcgtctaccaaagagaatctactccaagattttggctactactgatatggaaatcaagtacaagcctaaggtcttgatctctcaagtgtggaatgctattgttatttccatgtacagagaacacttgctagccattgaccacgttcaaaaattgttgtaccatcaagttccatctgaaattgaaggtaagagaactttaagagctccaactttcttcgtatctcaagatgataacaactttgaaacggagtttttcccccgtaactctgaagctgaacgtcgtatctctttctttgcccaatctttggctactccaatccctgaaccattacctgttgataatatgccaactttcactgtgatgactcctcactactctgaaagaattttactatctttgagagaaattattcgtgaagatgatcaattctccagagttacattgttagagtacttgaagcaattgcatccagtggaatgggactgttttgtcaaagacactaagattttggcagaagagactgctgcttatgaaggtaacgatgaagatgtggaaaataaggaagatgcccttaagtctcaaattgatgacttgcccttctactgtattggtttcaaatctgctgctcctgagtacactttacgtacacgtatttgggcatctttgagatctcaaacgttgtatcgtactgtttctggtttcatgaactactctagagccattaaattgttgtaccgtgtggaaaaccctgaaattgttcaaatgtttggtggtaatgctgaaggtttagaaagagaattggagaaaatggcaagaagaaaattcaagttcttggtttcaatgcaaagattgactaaattcaagccacatgaattggaaaatgctgaattcttgttgagagcctaccctgatttgcaaattgcctacttggatgaagaacctcctgaaaatgaaggtgaagagccaagaatctactctgctttgattgatggtcactgtgaattactggacaatggtcgtagaagacctaagttcagagttcaattgtctggtaaccctattcttggtgatggtaaatctgataaccaaaaccatgctttgatcttctacagaggtgaatacatccaattgattgatgctaaccaagataactatttggaagaatgtctaaagattagatctgtgcttgccgagttcgaagaattgaatgtagaacaagttaacccatatgcccctgaattgaaatacgaggaacagaatgctctacatcctgtcgctatcgttggtgctagagaatatattttctctgaaaactctggtgttctcggtgatgttgcagctggtaaagaacaaacttttggtacattgtttgcacgtactctggctcaaattggtggtaagctccattatggtcaccccgattttgtgaatgctacttacatgactactagaggtggtgtttccaaggcacaaaagggtttacatttgaacgaagatatttacgccggtatgaatgctattttacgtggtggtcgtatcaagcactgtgaatattaccaatgtggtaaaggtagagatttaggttttggtaccattttgaatttcacaacgaagattggtgctggtatgggtgaacagatgctttcccgtgagtactactacttgggtactcaattgcctattgaccgtttcctatccttttattttgctcaccctggttttcacttgaataacctgttcattcaattgtcattgcaaatgtttatgttgaccttagttaacatgcactctttggcccatgaagctatcatgtgtagctacgacaggaacaagcctattactgatgttttgtacccaattggttgctacaacttgtctccagttgttgactgggtcagacgttatactctgtctattttcatcgttttctggattgcatttgttcctatcgtcgtccaagaattggttgaacgtgggttgtggaaggccactcaaagattctgccgtcacttgttatctctatctccaatgtttgaagtgtttgctggtcaaatctactctgctgctttgctaagtgatatgtctgttggtggtgctcgttacatttctactggtcgtggttttgcaactgcacgtattccattctccattctttactcaagatttgctgggtctgccatttacatgggctccagatccatgatcatgttgttattcggtaccattgcccactggcaagcacctttgctatggttctgggcttctttgtcatctttgatgttctctccatttatatttaacccacaccaattctcatggcaagatttcttcttggattacagagatttcatcagatggttatccagaggtaacagcaaatatcatagaaattcttggatcggttatgtgagaatgtccagagctcgtatcactggtttcaaacgtaagttaatcggcgacgactctgaaaaatctgctggtgatgccgctagagctcacaggtctaatatcattctttctgaaatcatcccatgtgccatctacagtgctggttgttttgttgccttcacatttatcaatgcccaaactggtgtgagaacaactgatgatgaccgtgtgaactctactttgcgtatcattatctgtactttgggaccaattgttgtaaacttgggtgtcctagctttctgtgcgggattatcttgttgctctggcccattgttcaagatgtgttgtaagagtagtggttctgtgatggctggtgtcgcacacggttttgcagtaattatccacattgtattctttattgtcatgtgggttttggaaggtttcaatttcgctagaatgttgatcggtgttgtcacctgtattcaatgtcaaaggttgatcttcttattcatgactactttcatgttgtcccgtgaattcaagaacgataggtctaacactgcattctggacgggtaaatggtatggtatgggattcggtgctatggcatggtcgcaaccatacagagaattatgtgccaagactgtggaaatgtctgaatttgctgcagatttcattttgggtcacgtaattctatttgtccatttcccaattttattgatcccacagattgataaattccactccatcatgttgttctggttgaaaccatctcgtcaaatccgcccaccaatttattctttgaagcaaaaccgtttgcgtaagcgtatggtgagaaaatacagttacttgtactatggtgttttcattctattcgccgcatgtatcgtaggtccagctgttgcatcttcccatgtttctaagactatcggttctagtttaactggtactttcaagaatttggttcaaccaagaaatacatccaataacgataccggtaagcaaatgtccacttatgtgagtcactggtttacttctactccttctttgaagacgtggtccaccaagaaataagaactgttttattttttgttactttattgtcgttttatgtctattactattatcaattttagaaacctttctatacctctagcgagacgaataaagctaacgtttgctgagaaatacaatatgaaggcccctacaaagatttgttcaacaaaagggaatttgatgatatacagttattactttttttttttcttttcataaaatatatatatatgcaaagatttatatatatatatttatataaggtacatgtattctagttgtcaactccatcgtctattctttaaccttctggcgtaaaacttcctaaaatatgatttttgagatctcccagtcggatttgatgcgacgcaagatgtccggcgacagtaaatgtccgagcgacccaaaagaaatatcttgacgacgcaaaatagagggacgacgcaaaataaaagagaataaaacattttatgctttcatataatattaagtatattccaaacctcgaaatagaataaagcatatagaactatcatttttaaggaacaatgaaaatgagttggagaggcattctttttgtattatcaagtatcgtaagcgcggtaactgcgatttcagcgctgaaccgaaattctgtatttgacatatattctgatagcattgcaccaatcgaagtcgttgggaggaaattttacaactctagaactggaaatcagttctttttgagaggtgttgcgtaccaaccaacgatagcgtcagaatcttggaatcctgaaatattaaattcggagaccaactatatcgatcctctggcagaaccatctctatgccttagagatctcccattcttcgaaaaattggatgtaaatacattaagagtgtattctatcgatactagaaaaaatcatgatgtctgcatggaagcattagcgaacagtggcatttacgtattgatagatttatctgagccaaatcattccatcgagagaaatcgaccaagttgggatatctcaattttcgaaaggtatacctctgtagtagatgtaatgcaaaaatattcaaacgttcttggattctttgcaggtaacgaggtgactaatgatgaaacgaatacgaatgcatctccctttgtaaaagccgccattagagatgtaaagcaatatatccaagaaaagagttatagacagattcctgttggatattcttcaagtgatgatgccaccactagagattctttggcaaaatattttgtctgcggtggtgaaactgcagctgatttctatggtattaacatgtacgaatggtgcggttattcgtcatatgcaaccagtggatatagagaacgaactttggagtttgccaactatcctattcctgttttcttttcagaatttggttgtaatagtgttagaccaagaccattcactgaagttagtgccatatttgggcccaagatgtctcaagtttggtctggtggcctagcgtacatgtattttgaagaggaaaacgaatacggcttagtaaagattgacgaaaccggttcagttcatgaattggaagatttcaaatatttacaaaatgcttatagaaacacttcaccttatggtatcactaaggaaaaatatctgcaagatattagtttcgccatttccacgcagtctgttgaatgtcctaatgaagtgtctgccgcaaacactcacacaccctggaaagcaaatgtggaaataccaccatctcccaatgccaaaatatgtcaatgtttggagcaagtcttaccatgtcttgtatcaccattgaatggttggaattttcaagatcattttgattatgcatgtagtcaagtggattgttcagatattaccactgatggcgaaaagggaatttacggtgaattttcatactgcttgcctgaacaaaaattatcattagagatcagtaaaatgtaccatatgagaaaccaccccactggagtttgtcccatgagcagcaataacgtctattataatgcgcagagtatgaatataactgaccccatgtgtattgaagtttcccacagattgcaggaattacaaaaggcggcagacagtagaaagacaccagcagtaaaaaaattagttaaacccaaaatgaaaaatgccagtcatactaaacttttattagatacagactctggttcttcggtaaagtttaaatattcaggatatgcaattctactcatctccattatatttgccactatggtcttttagaaaaaacaaaacaaacaatgcaacaataattcttttcattctttctttataataaataagttctcaatctctctttggaccccaatgaacacctaaaaatccgcttggcctcacaattgtgttcaatttaggcttaatcaaataatgacgcttttcacccggtacatcgatgtacaaactgatgatatctggttgatagtgctcgtcagaatcaacggcttccacatgaactaaacctctcctcttcttggattcaacgttgaacctcatggaataatgaaatctacctgatttatccaatttcttctgtgaggtggcgggtctatttcttgtccatttatcacttgcaaaaacttcaccatatgcctttaatctttccttgctatcaccatcatcatcacactgtaataaagaccttgaagattcatctttttccacaagagaaaccgaacggttaaacattctagtatcaccagaaggtgagaatagttcagatgtgattaaataaatgacgatcgccgataatccaacagcaccaacgactaaggttcctgaaactgtaaaagtggtaaatgatttaattcttggccaaattccaattttattctttttcttattattctgttgatcattactactaccattttcagcatatgaattgaatgtagaataatgcttgatttttggtagtgatggagctgttctcaatacccgtggtttaagaagagatgatgtaatctcatttggcctaaaagccattggcagtcgtttagcatatagatttaacattgtggtatggctaactattatgagtttcttaagaatatgaacagatacggaattgaggattctcaaccttcactagtaggggactaaatgatttgtagtagtgaattaaaggatcattcggtataaatttttacatgatagaaaagacaaaataatgacaaaaaaaagaaacgtggacaacggtgtcatggtcttaacatggactgtaatctaatgtaggttagagcacagctggatactaactgtgcttagcagactaatcaatccaagtgttccttatttaacaggtaatgagatattctcttctcatatgccatcgcatgaatagggccaagtctccttccttcggagtagaggagtgcgcccccttagtgcaatggttagcatacatttttccggtggatgtgatccgggttcgagtcccggggggggcttaaggcttcggccaaattttttacatccatggacctataacatcttcgatgttagctatgttgctgaagtttgtatcaaactgtatgatccattacaagtcctttggcattcaattcaagtgtcagcataaaatcatttttcttgcctcttatgaagttaattaacttcaatggaaaacgattaacttaaataatttcctaagattttaatgagctgtgcaacctcatgccaattcatcaagaccatttaatattgtaatattggtcactctagcacctttaattatttcattgctcaagtcaagccgatgaagtttcatatgactgtttctgattttcggttcatctaacgcccgtacatctgctgattctaagaaaaaaatatttttctcgaatcttttcaaactgcgtcggtcaaccaaagcgcgtggtcgcgtagtaagaggctaggcagagatgcagtaaggtatgaccctctgactatccgcctagactctgcctatactatgtacagtctccctatggactccacctagccgttcacgtctccttccaatcttcggtctggatcctcggagtgtcccgcctagcctcataccttcaaccgtcccacgcaacatccggactcaatcatcactttactctagtgaaatttcaaaccctatcatcagcgtacagtcaatagtggcaccaataggacaaggacaagcataatggctaagcaatctctaggtatgtggttatagaaatgatgtgggatgttattatcgatatttgaatttctttactaacaggaatttttaatagacgtttctttcgacagaagcaaggccagaaaggctcacttctctgcaccatcctctgaaagacgtgtgcttctatctgctcctctatctaaggaattgagagctcaatacggtgtcagagctttgccaatcagaagagaggacgaagttcaagttactcgtggttccaagaagggccaagaaggtaaggtttctagcgtctacagattgaaatttgccgtccaagttgacaaggtcactaaggaaaaggctaacggtgcctctgtcccattgaacctacacccatctaaggttgttatcactaaattacacttggacaaggacagaaaggctttgatccagagaagaggtggtaagttggaataagctcatctcattgatctgtataattgctttctaatataaattaaaaacattgtcaagaatagaatagattgagacgaaactcattgtagtgtgtgttttgttgttttatacgttcttacttgtacgaactctggggtaatattaatcttccggtgtgtatagaatgtcgatttattaaatccggggttgaacccgtaaggagaactacagcataaaagtctcgagaaagatagctactacatatataatataattcaagatccagaggagatgtcggtttttgtttctgatgacgaaggtttgatgactgaacctattatacgtcctggtaaccatatggctagaactgggaaaagatggtcaggtagtggtcaagtacgccctataaaacaatccaatatggatggtgttcatgagtctgtagaagcagaagactacatgtcaccaggtcaactgtactcaacggaatcaggacgtcttttccatgcaggtaggatattgattgtcctagtgggattaccagcaacttccaaaactcttttatctgtcgccattacgagatacactagatggcttggtgtaagaacgaaatcattccatgtttctgaatatcgtagacaaatgacggatactgtacctgatgaatatttctctgctgttcctcagaccaaggaagggattgaatatcgtcaaaaagtgatgagaatagttcatgaagacatggtcaggttcttcaatgacacaaagggtcagttggcagtttatgatgcactgaacattcggcgtagtgagcgtaaagatattgctgataaattttcaacgatgaatattaaagtactcttcatcgaatcgcatatgactgatactaagttggtagatcgttccattaagatggctgcacaatcctcagattattatggattacctaaagtcgaagcaagagctgaatatatgaagaggctgaacctcaataaacctctttacgaatccatgtcgccagaggagggtctttcgtacgtggagtatattaattttggccaaaagttaaggatttataacaaccattatggctatttgaccaataaaattgttttctttctcatgaacctacgtgaaaagaaaggctgcgtctattttgccaggtgcggaactagtgataaggataactatttgaatgatgaagaattaaatgaggatggtaaaaaatattcagaaattctaaccgatttagttttaaatcgtattaatgaaagaagacgtaaaagccacggagctagaacaccagctgcccgccaaatttctttaacaccgcaatcttcacaatcttccttagtccccacacaggcaagtattgacagagaaacctatagaggagatcatcgtgttagacagacaccttcgtgggatggtgcagatgaagattcattcgtcgtatggactgcaccacgaaagagaacctacgacacggctagattttttcaggaaagtggcataagcgttcgtcagagatctcaattgcaacaattaaaccccggtgtcgttgctgatatgtcagacgatcaaataagaaccgagtatccaatggagtattcagaatggttgaaagacccttaccattaccgcttcccaagagccgaatcctatcacgatttagcagttcgtatggaaccgttgttactggaaatggagcgtatgcgcggtgatattttaattatcggccatgaatcgacgctgaggattctttacggttatttgatggcgtgtacttgtaccgaactaccatctttgaattttcagcgtgataaactaatcgaaatttcatttagcccatttcaaaacaaagcagaccacatcccgattccaccagtagattcatactcatcaaaatggtcattataatatcaaatcactattacgtaaatcgtataaacacctcatatattcttgatttcgaaagaaaaaaaaaaagctgtttggtatctggttaggttttcgtggactcatcatcatgttttcgtagtatactcggaaaaatcgccaaggctttaatgaccataatgctatgctgcactaaatgtattgttgtccctcatctataggcacactctaggagccgtttcctttcataatattaccttttctggaggttaacggccgttgtaaatcagccgtaaatcactttcaggatttgacaaaaaaagacgaaatggaaggaaaggaacacgcttccaaacagacctttgtcttccctactaatcccttatcaatctattcccttagcaggtcatatcttgttattacatctggtttcctgctaacatggcgaccacgccctctgtatatgatgagggtcattggtgatatcaaaaacttggtccatacggttgccagagggctcaaccggggtgtccgtcctgcacttttatttggtaacattaactctctacgatatatcgatggtagaaacagtagctaaactatgcaaattcttttggcttttttatattcttgccattactaactttccaggagcacccccgaacttattgcacctttgcttatataatagcctttgaagtctattttatctgcgctttacgagcttgtccgcggcgcggaatcggctcttaagcccgtggactaaccggctcttcaaaagttaacaacatcatatcattccagctttgaattcttcatcacggctaacctgcggtaatatgcatccttttcttccttcaaagttattggcgctaaattgcatgaatccttaacatgcaggtaatcgcatatacgccaagtgagtaaccagtctattagaccgacctcccttatgatcgatacaaccacgtaatacgtggaacctagggcacctcccagagtaaatccgaccaatacttgtccaatggaatgatatttcaaataagctctcgaaaaacaaacgcatgtagccaaagtaagaacaaaaccacaacctgctaaccgtttcttgtgagtgagtgacttccaacagtatagataccgaagacttgtataagcagcgaaaaatcccataaactgagaatgcgcactgggcataccataaccggacctaactgtatcttgctgaaatgaatcaccaaacgtaaacggtctcggttgttttattatatccttgacaatgttgttgaaaatttcattggcaacctggccagctgccataatgcatgcctctaattctctagttatgatgaaccatgagaattcaaatatcaagacaccaatcggcaaaagtgaaaaataggctgctaagaacgagattggatcagtcttatcgtagaggatgtaggtatcatcaaagggaatgaggttaggattaaaagacatgggatactattgactttaatttagtctccggtagaccgataagcgctttcagaagttggttcaagtgcaagtttcgttacgtcaagatcttatgtatgttttttttttttcgataccatcggactgaccaagaaattcaagaaagccggtcaatggaaaattgttactacgaaggcgtcgactgtcattggtacgtataaacacgaagagctgatatcttacctggtacgaccggcataccgataatacttcagactttgagaatagtgaatcgaaaaaagatcgaggcagaacagaaatccaaaaacgaaaaagaagaacaaaaaaaaaacaacgagaaaacacaacaaaacaaaaaaaaaaaaaagaggaccaaaaaaaaaaaaaaaaaaaaaaaaaaagaccaaaaaagtggatgatgagaaatgtatagtcgtgaggataataatataaaaacatgaaaaatgaaataagagaaaaaaatgacgaggatgaggaggaggaatagaaaggaaaaaagaaaatgagaaaatgaggaaaaaatggggaaaaaaatgcgaaatcacaaggaaagttgatgtttttgctgctctcttgcccacctagctgtatcctttgtagactggctgaatgtctggttacttctagttctcttgataaattccgttacccattcttgcgcgtaaaattgttttatggacccgtcagggtacatggcggcgatatcaccaacaataccgacagccgctcttgcggtggaatcttcgccatataactgaggatcttcggctaataaggagatgaattggaaaattgttcctacgtaagggaaaagcgcagcaggcgtactccgtagacctgcaacagtccccacataggcgtcaagaacagcttctaaaactttaatttgataatccaaagcttctaaagtaccattttcaggctttgtgttctgagcggccacgcataatgccatgacttcgttcaaatatggtgtaaagtctgggcccacgttagaggcaatgtcaccaaacacaccgagaacagctggtttcaattccctcttggcattttcagcagaaatcatttgacccaaaacgctcataaacgcaggtgcatacttcttgaaatcttcttccaaggaattggagatatctgccacgaatccaacggcggtaatagagacttgtgaatctacttgatttaaagctctcaccaaatatggtgagaaagtctccaggtatttctcgaaattcttacccatggatgaagctaatgcggaaatagcatagaacacgtcatcttcaatgtaagacgcatccttcttatccaaaagcttcaagaacaagtccatcaacatgtccgacacagattccacactagcaggagatttccttatcactgcagctaaaacggttagaacattcgattgtaactcttgtaaactctgtctatcttccatggtcaattgtgattcatctaaccccatagtttgacccaatttatccatgataaaggtagaaatcgatgctgagctttccgcaacggtatcagtagcatattcaaccattgtggttaatgctgaaaatgctgaagctctagcgttaaattcgttatcaggtctgctggcagtcttaatcagggcatccacaagtgctgggtagtagttatagatggggctcggccttagttctgctagttgttctaccagattgattacagtccatgcgcagttagtggccaccttagggtgatcttgtaacccaaggagacaagcctgaacgacgttgggcagatgttgttgaggatcaatagcatctaccaccagatctgcaactctaccaacacaccaagctgctgtttctttaacttgaaccataggatcagtcatcaagttgaagatcgctggcaatgcttgatggatgtaataggtcctttgagttctatcgggaccgtccataatagagccgaaagccattacggaggcctctctttgacgccagttttcgctggtaatattttgttccacaaattgtaaaaccggttccaagatgtaattaccacaattttgagcaaatagttgtaaacaagcacctgcggacatggacacgttccaatcgtcatcctcagggtcctcgttctggcgagttagaagacttagtaaattggggaccacttcctttagggacgctagagcaaagttgtaactttgtagcggggactgtgggaattgggctagctcgtaggcgatatcaatttcttcttcacaaatcgtggaccaaaactcaaccgccatagaggctaccctgtcgtcaggagacctcattgtggctatcgttagcgcataaagcgcttgttccatgtaaggtttcatgaatgggtagtaaagtgacatgattttgcagagacaaccaaatgctgcagtctggatcgttgtatcgggagcctgagtagcttcacaaaccacctgcatcaaataattcctttcaccttctctctccatgttatttttaataaatactaacgaatccgccaacgcattcaacgcagtcagacgcactgcaaccgaaggttctgaggattgggcaccttggacaatggcaattagaatactattggaagaagagactagaacttgactctgagggtcagcactttcacagatgtatcctaaagtcaataaagaagctcttttaacgttttcaggttgagatggattggtactgtccaccatggttttcattagatccccccattcgcctcttggcaattcgatattggcgatggcagcaatcaattgagcacttgcattagcaacacggggttcgccggttaacagagcttgaacagtgttcagctttatttgatctttcgaagcaggatccaccacggtaatccatctttgagcgtattgagatgccttgacggaatccttagcaaccaattcattcttaagtgtcaatgctgccaatatacgggcctccaatctcgcattttcgtcgattaaaacactagataaaaggcctgcaaattgcaaaaaattctcatttgaaagtttcttcaactgcgtttcattcgctacacgtagcgattgatcaggagtcagaattacctcctccaacagttgtgctaattctgcagacatagctcagtatattgatgtactcttgggtggcaaacgtcttgctatgtttgttgttgaagagttaattagtcgttaaagttgtccaaaaactttttttttttataaaaaaaaacttcgtacatcggtatatatatggccatgtgatatacacgtgatcgtgtacaaaaccctttatcacgtgatctattgagagtacttctgctgtaattcttcaacgaattcgatgtactccttctcagcatcttccttcgacttacccttcaattcttcccatgagtcccacttgtagcgatccttcatgttgaaaataccaggcttttccttattgttgtcaccgacggttgcctgcttgtacagagcgtatagctttaacaattcatcagtgtcaggcttggagggcaattcgttagcttgcttagctttctgttcaaataattgtgataccatggcggcgttgagactggacgatactgttgtgcttgagatactagtatgtgtatctctactagtatgaggatccaaatgtaatacgtagtagacaggcagttaagtagacgcttagggaacacattgtcagaaattcaacagttgattcacgtagaaggtgatggatacggcgggaaacgttggggaacgacgagaaacatccttacatctccgatcggtttggatcgagaaaaaacaaatctccgcgacggggaattgaaccccgatctggcacgcgacaagcgcccattctaaccattaaactatcacggaaaggaaaattgtatattttatcttcgttgctataccatcggagcgattccaattgtcatgcgtaagctttttttgctgtcttacgtcaccctcacctgtagaaaacacgcacatttcacgtggtgttaccctcagatgtgaccggacgaaacaataagaaggaaaaagaaaaaaatatctcatgtgctgaatcgcggtggcattcccgtttccgtaagcctcgtaagaaagaaaagctcttagaagacacatacattatacagccctgataggtgaaaaaaaaaattaaagcataggaagagattactagcaagtaaccatttttaacaacataatccatatatatagggtttcttcagttagtaggagttgagattggacaactttaaaaaaaagcagaatctcaaataacagatatcagaattctaataagatgacaccagaaccaccttcccttacgaggcagagttcctataccaatggatattcacgagatcagtcgttgaaaccatttccatcaggaggacataatggtaaattaatgggtgaaccggttaaagatcatagaaggaggcgttcgtcgagtataatatcccatgtcgaaccagagacgtttgaagatgaaaatgaccagcagttactaccaaacatgaatgcaacatgggttgatcaaagaggagcttggattattcatatcgtcattattgtacttttgaaactattttatgatttattaccgggggttacagccgaatggtcgtggacgttaacaaatacgtcttatgttattgggtcgtacgtcatgttccatttgatcaaggggactccatttgattttaatggtggtgcatatgataatctaactatgtgggaacagattaatgatgaaactctttacactccgtcaagaaagtttttggtgttggtaccaatagcgttgtttttggtcagtacacactatgctcattacgatctacagttattcatgttaaatctactattaaccacatttgttgcagtggtaccaaaacttccggtcactcacagattgagaatctcaatcccaggtattacaggccctgctcaaattagctgaagggaccgaatgaatcgtccaaattttttttttttttaattaaataaattaaagcaagaaaaaaagcaaaaaaagattatctatttagatttgttggtttgtagaaagtgaagaagttgtatggtaagtaggcataacaggcattcaaaagtaatagtgtattgtttgaatctactgcgtgtttaagagtaaaaaaactgaaaaaatgaaaaaaataacgacaactgcaggattcgaacctgcgcgggcagagcccaaaagatttctaatctttcgccttaaccactcggccaaattgtcagtataagtttgctttgtatttctggatgattatacgcaccccttagctcatgtgacttagtcataacattgcgtacctttcggtatgcgcggtggtactactataccttttgttttcttaacctcttgtatatgtgtcagttttctcgcttaggtcctgctagttaatgacagatctgaatatcccataaaacgggccacctgttccttctctatgtatttatactcacattatttagacacgtctggatagatatcgaatcttctttgcgtcgtaataggaataccagcacggaattgatcgatggcttcgggatctagatctgcataaacgatttcttcgccttcaccagcttcagttagaacgttaccttttggatcaacaaccaatgaatgcccgtacgcgtgataactactctctaaatcacgagcaggtgagcagagtagggtgtagacttggttatcaatagctctcgatcttgctaataatttccaatgtaatggtccagttacagtattgaatgcacccggataaatcatagcaaatgcgcctttacgtgcagattgcatggctaactctgggaacctcatgtcgtaacagataccaacaccaaatttaccgtattcacttgtgactaaagtatttttttcacctgcactcaaggtatcactttctttaaaccttataccattagggatatcaatgtcgaaaagatgcgccttacgatgcttgtctaatagttcaccattttcattaaatatcatacaggtgttgtaaatgtgatcagtttctggttctaattcaggaattgatccacctactagtacgatttttaatttttgagccaactgtgataaggccttgtaggattctgaatcaggtctaataacttcagaataagctctaaatttatcggttgcatagggtgagttgaaacattctggcaatacaactaacttcgtacttggctcatcatgaacagctttctctataagtgttttagccttctgcaaattgtacgccttatcaggtgtacctgctgccaattgcactagtgcaaccttgatcttctgtgacaaaatcttggacatagtcttgtgtatcgtagcgtattggatttacctagcggaggttttcggttgttcccttcgagatgaaataaggtcgctcctttaaatatgtctaggtagttcggttaaatcgacccagttcggtctctcgatgataattcaatttacaaccattaggagtactatagaatatggaaagtataaaagattcttataatttggatcctgagaaggctaatttaactgctctatagcccattccaagaccagcttggtagccgtagccagaagcaccataattgtgcactataagaacaccatcttgagcttcttcctcaatacgagcgccaccatatctagaaggacgtaatcctgcagcaactcttagaatctgcaatttatccttatcacctagtttaggtagcaattgagtagttctcgtcaagatatcttcagattcttctagcgaagtgtcttgagcattccaattgtccacctgtagaaatccaccaagaaccaattccttgaggggacctggtctggggatgatataagtagcataatttttaccccaccttaaacaattctcgttaatgtcgggagctctcacaacgacaacctgtcctcttgcaggatagactctgtggtctttaacaccacctaaatcatgagcaccaagtcctgtacaattgaaaacgactttatcgccagtggaatcttcattgacaaatgaagtggcttgggccaaatgagtcagttcagccttaacgaatttaattcccttgctcttcaggaactgtgcaaaattgtataagaatactggacagttaaaattccacgttttgaatgaaattccgaaagaagcgccgtcgggcagctcctgggatttaagctcctgataatcttctaaatagctcgaaagggaccctatcttgagttcgttgggagtgtaatcccaaaattctcgtgtaggtcttcttgcaagacctagccattcatcatcgcgacctttgaaatgtgataaaagcttcctctgcaattgacttaaattctcataggtaaatctatcatgaaacaacgtattttcatcattgggtgaaatacaagaccaattaccacctgcccatggtgatgtatacccattagcagattgatcaccgggcaaatacttaccaacgacacatatctgtgatccaggcaattgactaaattccgttagacaataagcagtatacaagccgacaataccaccaccgacaatcgtaacagccatatcaattcgattttttggttttcacaaccatttttcctgtcgtagtgtattccatctcatcgtctttatataatgcaacttttttcaagtgaaaaatctctggtgtgactcactaccaactacgaagctaccaaccccagaaggtacatatgcatctttaactgctcttttttctgcaattgaatcactgggaatttatcttgcaattatgtttcccggcttgataattctacggaatcccatcaccgtattcttgtgccaagttatacacgtaatgaagaaaagaactgtaccattgttatcgccatcgaaactcaatggacctctaattctgacacgaccaccgtagatccacaattcatgtgaatgaaataaattcgagttctcgtcatattaggaagtttaagatcagggttaatttcgtgtaccgtgtcgattcgtactaagacattacattctaggtttatcgtggtcaggaattttacagtttctatttctaatacaggtgaaaccttgaaacttatccacgatattgtggatcagtgagtataagaagagattgagcgctgagcttggatcagatagagggcgtctgtatacttactcctcgaggattccttcactgaatcactggtgattaatccatcgatgccacgtaccattacttttgatatcccatcacaatatcaactagtggctcttatcggtgagggagcctacgggacagtatgttcagcaatccacaagccaactggcatctatgttgccattaaaaagattcaaccatttagcaagaatatgttcgttacaagaacgctacgtgagatcaaactgttaagttatttccacgaccatgagaatataattagcattttggataaagtcaggccgactagcattgataagatgaatgccgtgtatctggtacaggagttgatggaaacagatttacagaggatcattagcaacatctctacaaatcccctaagcgatgatcacattcaatatttcacatatcagatattgagagcattaaaatcgattcattctgctcaggtaattcatagggatttaaaaccatctaatctgttgttaaattccaattgtgatttaaaagtttgtgattttggtctatcgagatgcctagcaagcagtagcgattcaagagagaccttggtagggtttatgacagaatatgtggctacacgttggtatagagcacctgagattatgttaactttccaagaatacacgactgcaatggatatatggtcgtgtgggtgcatattggcagaattggtgtcaggtaaaccacttttccccggtagagattatcaccatcagttgtggttaatcttggaagtggtgggttcacccacttatgaggactttgaatcgatcaaatctcaaagagccaaggagtacatttctaatttgcctttgaaggcaaaactaccgtgggatgttgtgctggggaagcaaaatctaaatcctgatatggttgatcttttggatagaatgttagcatttaatccaaataaaagaattagtgctgcagaagcattaaaccatccatatttggcgatgtatcacgatccggaggatgaacctgaatacccaccattaaacttggaggatgacttctggaaaatcgacaatgaaattaaaaagcccaatgaagatggtgaaatttcaatagacgttttgaaagcgatgttatatgatgaaattatgaaacgcacagattaatggaggccgaagagcatatttgtcgttcttaattaacttgtcagtagattttactttatgctattctgtttatatattgttatataatagttgaactttaaaggtgtttttcaggtaaggttggacccgatgagctcttcagtaaaaaaatcgtcgtcatcttcatcactaacaacaaatgagatttacagagtaaaggactttatcacagccgccgcaagtcccattagattttcaaacactggtgatcctcaagcattaaagctcccgtcatgtcatggccaccagagattctttaccaaattctatcctatcagtttagggatttaatgagtagtgattatcctaataatgctgaaaagtttaacgaaaattttagaacattcatcaatagtaatttgactgttaataaggcattctcacatatttgtcaggttcttatctatagatattgtaacttgaccacggcaagaagatttcatcaccttttaaacacattgaaagagcatagggaactgcgaaatgctgtgcagattgtagatttccaagagttaacatcaattggactaggtagaaccggtgaaatgaataaaatgatcaaaaacttaaccaatgaaactttattggagtttttgcatttgaccaagtttacactaagagaatttttggcatgtgaacatattcaagatgacctcgatgaaaatatcatatattttctactgcggcctgggactgttttaagtgtattggatttttgtggttgttcaggtgcaagattcacagagagttgtattgtatcacttgataaattgtatcgatttgacaaagaaagacaaattgatttacccatcgaagagaattaccaaataacttgtttgggacttaatgattgcacagatttaccttcatatgttctcggtagaatgcttaggatgttaccagagttacaaaaattggatttatctcatacttccattgatgacgacattttactcaataagatacctcatctcaaaaatttaacacatttatcattagccatgtgtttgaaattatctccaagagcgattctagagtttttcagctatcatccagctgtaactgatgaaaacaatttagcaacattagaatggttaaatctttatacaatgccgcattcatcttcgtggtctgaagtgcacacacttttccttttaaaaaaactatgccagtatggacacaataagactttacaatatttgaatttgagcggtatgtcactacatgaatctaatgacaccactgttacgagatccacattctatttccaatgtcatgatgcattaacatttattaaatggaacttccccaaattaaaaagtttaagcattgcaggaaataatattccggtacccaaactatgtgaatttctaacgccaatttcccccgatacgatgtcagataattggtggttacacgaggatcaaaacatgcaacagttgaaatttttaaacgtttgcaacaattcatacgtgaacagatggacaattcaggattctgctctttatacatgttcgccaagtttagtctgcttagaggtatcatttgatgcatggcaaatgatcgaaaaatcaaattcaagacatgaaattacagtcttacattttaaaaatcccaactcctttttgaaggatacagcggatgcggaagttatcaaatggaaatgttatatcggttcatcatatggtagaaggtactggatctataaaacagatccgtatttaaacagagatgatttacaaactacagggaatgtgaccaggtacgattcagagggtaataaaataattgagattgttaaacaaccagatttcctcaaatttgctcaaaataaaatcatgcttggttgtggatttatcccacttagcggtgttagaaggaagaaatgctatagagatttgaaacccccaatttcacaatttttcacaagaaatggtggggttacgttgggtagtagatcaaccccgattataactcctatgttaccaccaggtggttggagagttgtatctaaccatgagcaggaagacggagcatcgctgagcgatgctataatggaagaggatgaggatgaagatgaagaacaggaattcgatgacgataacgtttcagatacttacagtgcaagtgcaagttcaacaacattttcacgtaccacaagtctaggaagaatgagaagcggtctctattgggatagatctatccatgacctacactcaagattcatggagtcagatataatggatccgctaccagaaccttcaataccccccagtattggtgaagaagttgaggagaacgatgaagaatatttgaacgaccccagtctacagagaaggaggtcccagttaaatctacagaggtcaagaccaccatctcttcaccacagacattcagcattggattcatcggcgtctatattactgcctctaaggaaattgcaaaattactattatgcacatccacaagaatttgtttataatccaaatgaccaggaaacaacactcaaatatcaattacatttccaagtaattgatgaataccaagtttttggctgtatagaacgcggtatgtatagatattacagcctaagagcgtaagggataggaaatgttcctttttttttttattttactattgttattgcttttgataaaagaatgaattacatatacttcgagaagcctgctggtgctatgacgaccttctgtattgtcaatatgctattgtgctggtagaacttcaaacaattgaagttcggtgaagaagaaaaaaaacaccagcgaagataaacaccaacgataacaatgcctatatgtttactaattaccaaaatgagttagaatgtaaatagataaatatttacacaaattcagtaaattagcaagcttttggataatgttctcgtcaatggagaatctacgcggagaattcttcatttcgttccattaatgtccctaatgaatgtcaattatgtgacatgtccggacggttggacttttcagctcattgcaaagatatccaaacactcgaatatatttcatcttattataatgtcttaaaatccaatgatatcacatttccttgagatttcattgcaagctggaactacaatcaagacagaggtaaaggtgacggtaataattagccctagctatctcttttcctcctgattgaagggactattagaaatttaacgatgccaaaaacatggcaatcatatactgggaatagcgattcttcttccacatacagtacagatatatcacgaccgacagttaatcctcaccgttcattctttgtcgaggattttgacgggcaaggtcccgatgacgaaggaagtagaagaggacttagtgtttacttagacgataccagattaactgtaccacctacaccatcggatttgaacagtagtgcagaagatataagttcacaagcagcaattgcagatagaagtggtgcgacgaatgaacaagctgatcacagtgagaatacaaatcatgaatatataacgaatctaagtcctggtgtagtagcttatcgtactgttaacgatagtgcttattcaggccaatcatcagaagatttacaaaacttcaatgccggtgtagctgcatttacacatattaatcgaccactcccgtctgtcattgcagaaggaccagatgagaacagttcatgtcgtaccggtgaaaaccaatcagatttagaaaattatgatcgataccctcataaacccaaatataatgatagagatgaacaggaacaaccgctgcaaccagcggcagaatttgataatgagcgccagattcctccgctcgatgaaccccctcacattaaaatggatacccaaagtatagagagttccataaaggatagtcttaatcaaagatttgaagatgccgcttgtgaaatagatacgagtaacgaagattccaacgaaactcggcagactatttccacatcaatattaatcaatgaaagagactcgctgccgtccaggtcgtcgattcaatatccgcctattgaggcaacctcatccagaattgagccgtcagatattgatatagatcgaagggtcgaagagttagaaactgaagctcaaagagatataccacccggaagttatggtacaagacttcgatcagaagggttcattcttcatgatttaaagatatcccaaagagaatccacttcacctcaagatgaaagtaagaaaaaacatgttcctcgaaatctatcactgttgagtaagatattgattccagcagctcctgattataccggtacagaaattccagtacttcgatcggtggggagtccaagagtaggccagcaggaaatcccgaagcagctagaggaacaggaggaagtgccagtggaggaaccgcaatcaatttcgccaactcctcaaagaccagagcctgcacaagttaaaccgatcgagcgttcgcgaccaacttcaagatctgaaggtttaacttattcacaagtggatctggcattggaagtattgaaacaatttcaagaagagctaaagagaaaaacaggattatctggtgataatagtaatgataatgataatgatgacgatgacaataatgataatgataatgataatgataacaatgatgatgatgatgacaattcaattcacaacaataactcaagttgcgacgatactagttaccacaatgataaaggttacgtgcccaaaacgatgccattccaaagggtagattcaaatgcaattgattccaaaatcccaataaacttttggcaaaaattcagcatttggagagttttattggtgatatttacatgcatcctatttccaccattcttttttatgatagcagctggtcataagcttggattttctgattttaggattattaagttgattacgcatccaagttatagagcaaggatttggaaggggttcctttgggatatcagtgtaagatggtttagatggctatgcctcatcctgggtataattgagacgttaggaatcttcgcaggtattgcggttgggtttggtgttagtcttggtgccgagtagttcgatttagttttagttttggcttcggtcacccgcgtcgtaatagcatagtattacatagtaaattgtaatgacagtaacgcaaatctagaggagtggcaactcaatccatgggccatggggggtgaatacgagtgtcagtattctaatgaccaaattcgtaagaagcacaaatgttggcatgatggcaaattgaagctacgcagcgatggcaaagttgcactttgcgatgaagatggttcaaagttgagtgtcaaaagagaaatggggagatggttagacccgaaaaaattcaatcaggaatttcaattctgcagcagatttgtcgttgctatcacatcactggatgagaagccttcattagcgttacctatgagaccattcaaaaccccccgaacgctaccgataggaagaccagcgaaaccagcaggaccagcaagacctgcaagaaggactaaagtcctacagctacagcaaagccaaatgccatccagaacaagagcaaggatacggcatgtccaagtagaaccaattcgcatataacgaaattttcattaatacgtactaatgctatacacgctataaagaaagaaggttaaatctaattgcaggaactctaaatttaagcggaaaccttcttctcaacgatttcccacaaggcaacgatatcgtgggagaaacgtctaataccatctgccaacttgtcagtagccatggcgtcgtcgttaacttcgtatctgaaaagagcttcgtcgttgatgaaagagaccttgtcatcaccggctttctttgcagattcaacatccaagaccttgtcaacggtttcctgggagttgtataattcatccaacaaatttggagaaatggtcaagaaatcaacaccacctagagccttgatttcatcaacatttctaaaggaggcacccatgacaatagtcttgtagtcgtgcttcttgtagtagttgtagattctacgcacagacaaaacacctgggtcttcttcaccagagtaagtcttaccggtctttgccttgtaaaagtccatgattctaccaacgaatggagagaccaaagtgacaccggcttcagctgcagcaacagcttgagggaaagagaacagtagagtcaagttgacgtggacgccgtgttccttttccaattcctgagcggcttggataccttcccaggttgaggcaatcttgatcaaaactctcttagggtcgacaccgacagacttgtacaattcgatgatgtgtagagccttcttgatggtaccctccttgtcgaaagatagacgagcatccacttcggtggagactctacctggaacgatctttagaatttccttaccgaattcaaccaacaatctgtcgatagcgttttcggttttttcttcaacggtcttaccgttttccttaccgtaagcaactgcaacatccagtagtttactgtattgtggactcttgacagcagctaggatcaaagatgggttggtggtagagtcttgtggttggtatttagctattgatgcaaaatcaccactgtctgcgacaacgaaagtaccagtggatttcaattgatctaatgatgaaagcttttgcttcttttgagctggctgaccagacattatgaatcggagttgtttgagatgttgattcttagtaagctaaacgctttcgcgaaagaactaaccgcagttaacacgaacatcttttcggattcgttccctttatatatgtgattccaggggtggactggtccatcgaagggttacgaaatccaggcgaaaagaagaaaaaaaaagacgacttcgcaacgaggaggaggaactgtccggaccaacaggggccatgtccgacaccgggtgtactggtctgtccgggaccaccgtcgtttctttttcttccagtccgtataggcaacatgcaagcgttactataggcaccgctatttattgtgatcgacaagcccatagccatctagatttgtccctgactaatgacgattaccttacaaattatactctaccggacctccatgctaggatcgctgctctgtgcccgtggaccgtccacatcgcctacagttagaactccatagtagaatccctcttgatgccatttattgttttgttctcccggtgtggctttccttctactcctacagcccacgctgctgttcgagatcgaatacaacagcttactgagaaaacattcgtaaaaagagtacacacctggcgctcaacagcgactgctataccaattgcaagtcgtagtctatgcctccggcaggttcttttggaaaagaaccaaaaccgttcttactcgcatggcccgtaatggttcgacctcccagcggcttgctgacgtgacacacatatcattcgaacatatacatatacatatacacgtatatatataaacgtttctttcctcttgcactactaaaataaaagttcctctaatcctccacaccgtcagcggatgccagcaatcgcaatactatgtcttctgcttttcatcctcgtgttaacgtacctgttcctatccgactccttatcgaatggacaatcagctaaaatctgaaacatcctcttgttaaatctcgatccaatcttctcatggactatcgcaatatgtctgttataagcatccttcctgtggaatattttatcgcagtattgatgtgggcatttaagggtagggtacgtttcatcctttagattcaacatttctttcaaatccgccggcagatggtccttgtgctggatcgcacaatgcctacggaggtccggcctccgtggcaatcccaagatcttccatggacacaatggaaaagggcatttgaactctcgccgaatatcaaattcgtccatgtgcgacgcatactcaaatatattcgaaaacgtctctggacaatgtgtacacctgtaatatcccctcttatgcttattagaaattacccccattaaaggctgatccatatgcaattgctccaacaacgaaagtccaggggtcggtggcactgtcatattgcgtatatcttgatgcttgggcatcaagatctgcggtgagatcaggtcaatcgctgaatcactctccgagacagtagctggcgccgaagcaggcgccgctgacataaaatttgtaatactgtcttgtccattttccgtgtcgccagcgtccaaccaccaagtatcgaaaaaccctggctgcaatagactttcaacaggcattgatagttcctgcgaaaaatccatcaactgtatcccctccattccactactaccactataacaacaacggcaacaatgccaaacgaataaaaaaaaagaagaaaatgaaaatgaagtcaaaactccaggcaagacaagttgtgccgtcctttcctttgattgcctttgagcgtacttccccagatcacgacgattaggttaataaactttctctttataaatcaataccatatcacactcaaccctttggtgaaaacgtaaatagtcatcctcatttttttgagatacacttccttaacaattatgatgcatgctaacaattatgatgcatgctaaaccgatgcgcattttaacgtatcttggggcttcatctgaaactgttaacgacagggaagcgcatcactatcagaacacacacgcgtacggacgtactgacggttctacctacctacgagcttttacacgtacaaaatttacttgttcatccacgtatttccgatatttacggcaagtcattgctatgtccattgaatctaataaaaacattcccaagaccgtttccgggacgccctgttactacgcataattactactatagtggctgctgccaccctttcctggcactaaactaagttaaactaaattaaactaatctaacctagacattcccgctgggcttaagccccgtcgtttcttatatttcctttacccttttcttttccattgtctttctttatctttaccttttcctccttacagtacctgcttcgaacctacggcctgtctttagcgtcgttatcaaaatatgtctactttatgcgtgggtaggcagtttatagtggtgcggttccgccacacaaagtcatcataatcataatcatctcaatagtaacaaactccatcctgcattgttcccccctccttatagtctaatcaaagcgggctcaaatacatatagttggtgatggaacgatgatgtggaaacttttcgccctgtgaaattgtgtctagatctggatccaacactacgtcatcccccggaatccaattgacaggagtcataatattaccattgtgcgcatccacagtttgtagactatctatacatcttagtaattccgcggtgttacggcccgttgacagtggatacgcctgtatcaatctcactcttttgtgggggtcgatgatgtagacggacctcataggaattggcttgccagctctatcgaaatgtaagagatctatcatgccgtatgttgttgacacctttcgagattcatcgcatagaatcggaaagcgcacttgactacccgttatcctctgaatgtctagcagccattggcgatgagtctcagcatcgttggtggaaagaccgagtaatttacagttacgtgcattaaattcatcttgtaaggcagctagtgcaccgatctctgtcgtacagattggtgtgaagtcacttggatgtgaaaagaacagtatccatgagcgtgatgagtactggtagaagtcgatgaaaccttgtgaagagggacattggaaatttggggcaatggaatggaggtagacactcggacggatactcatgaagacgaatatgagcttgttacttacttttgttcagacttcgaaatcgttctcttatttcgacgttggtttatacgggcgatagattttttagtcagagtttagttgttagtagatgaaatgaacaagttaaaggaaagagaagcacagaagggagaaaacagagagacaaagcagggataatggctcaaaatgctaattcgaagagacctgggactcctccacaagggcagtctcaacagcaacaacagcagcagcagcaacaacaacaaccgcaatctcaacagcctcaatcccagcaagctcaatcccagcagcaaagaggtcaaccaaggcccaatggtcccttctcggcttctgatttgaacagaatcgttctcgagtatctcaacaagaagggttaccatagaactgaggcaatgctaagagcagaaagcggacgtactttaacatcgcccaataagcagtcaccagccaatgtgaagactggtaaattacctgaaccaaagacaacaccagcaggtgtggataagaatgccaaaccggtcagtaatccggccatccccgccaagagagactcgtcgtcagctgtggttagcgaggagcaattaaaggaaactacctcgtctgagaattacattagagcctattcaatgctcaaaaattgggtcgattcatcgttagaaatctacaagccggaactgcaatacattctgtatccgattttcatctatttgtttttaatccttgtctctaagaatgcattacacgcaaggagattttttgacagattttcaccagattttaagattaaccacagctcagagattaataggctgtttagtgtcaattccgtggatcatatcaaggaaaatgaagtggcaaacgcgttccatacaaaccgttacaaagtaacgatttccaggacgacgttaaacttattactttatttcctcaatgaaaatgaaggtgtcggtggttcacttattattagcgcaataaatcaacatttggatcccaacgttgtcgataccgttacttccaaggatcagttagccgacggtatcaaagtgatcgagtctagtggtaatgctgatgatagcgatattaacacggctaaagttaagttgggaccatatccaagagatcaagagttttcaaaagaaattgaaactgaattgaaaatcagagatgaacaggagaagcgctccgataaacatacgcttgtgcaagaatacaaagtcatgaacaatgaaccttacgaagaacctacgccagatatcaaagaagaagagagggagaaggaaaaggagaaagaaaaggaaaaggagaaggacaaagaaaatggtgagaaaactgagactagtggtactgatgataaaggtactgatgataaggacggtgaaactgaggaaaaggaggaaagtaatgaaaccgctccaacacctaaaacggaagagaaaaaacctgtgactaaagcccaacagcctcaattggaggatgcaaacatggaatcaccagcacttgatgcgttaccattaccaccaaaaactactctcgatattaaattggaagttcaacgtgttaaggaatcaagagacgctataaaattagacaatttacaattggcattaccgagcgtttgtatgtatacgttccacaataccaatagagacatgactagtctagagtttagcgacgactgccggttagccgccgcaggtttccaagatagtcaaattaaattattttcactggatggttcaccactaggtaacaggtatgatccagatttaccagaagatgcgacttccaagacgttagtaggtcatagtggtacagtgtattccaccagtttcagccctgacaatcgttatttggtctctagttccgaagataaaaccgtacgattgtggtcgttggatactcacagtgctttagttagctataaaggtcataatcatccagtgtgggatgtgaaattttcgccgttaggccattattttgcaactgcctctcacgatcataccgctagattatggtcttgtgatcacatttacccattgcgtatctttgcaggtcatttaaacgatgtggattgtgtatcattccatcctaatggttgttacctctttacaggttccagtgataagacctgtagaatgtgggatattgctactggtgactgcgtaagattattccttggattgactgcaccggtcatttctacgtgcgtttctcccgatggaagatggttatcaacaggtagtgaagatggtattattaacgtctgggatattggtacaggtaaacgtttgaagcaaatgcgtggtcatggtaaaaatgctatttattctctagcgtactgtaaagaaggtaatgcgctaattagtggtggtgcagaccattcagtgcgagtctgggatctcaagaaagctactacagaatcaggtcccgaaccagagcaagcattcgttggttatttgggcgatgttacaggttctatcaatcaagacattaaagaatatggtagaaggagaaccgttataccaactaatgatcttgtagcttcgttctacacaaagaagactccagtgtttaaagttaagtttacaagaagtaatctggcactagcgggtggtgcatatagagattgaaaaaacgacagaaaaaaaaagttgtatagaatgtctgtataatagtactattattaatatatgtccattagtctagtataggtctttgagattcccatacccttgaaagcgatgcctcgtagccgcggtaattggtttgccaatatacaaaccactgaggtaatacgaagatgtaaaaggatgataggcaccaggcaacaacggcgtacgataaccccaatgctagaatgacataggtaaatacgattgtgcttaatacaagcgcatataacctagtattaaacacgaccaacttaggtagaattagattaagctgaatgcatatgaagaggaaacagaaaacttgagtagaagaatttaatcttgatgctaagaccgtaacgattgccagaagaagattcgtcgatagattcgaagtttgggatgccgaatttggtgacatagatcccacatacgccagtgttaaccaaaaggcaagagtccagatggaattagatgcagttgtcttggataacgattttagaaccggtgataatgttaacatggcaaatgtaatgacaagagatgatctcaaatcgacccagcgtcgtgttgatttccaactcaaatacagaatgaatacagtcagagctatggtataaggtagtggatccactttataatgatagatgaaattgaatgcaatgaatacaagtgaagtgctgagcagtttgttgtaaaaaagtaccaaatctgttcttacctgtaccactggtgtcgctgatgtcggtgatggccatgcgtatttacccttatatcgtagcctttgtgcatgtctaataaattcaggatctgtataattatcaggataatcttgacgaatccacaatattcttttccatggttcctttttatgctcccccatcatttcctttccatgtcaacatgagttttgtgcattgaagaagttattatcatcagccccattaacataaatatctaaactacaaaaaccacatacataaccctatgagaagctctaagactatgcatagtaccgcatcatctgtaagacctgttcccacagctgaagaagaggaagagacagataccgctttttacagatatgttccaagaacattacaacaggggggtccattttacggctctgttagccaaggtaaattcgcagacagtgataggggaggtagtaggagtggctcaactaaacacttagattcaggaagaaccgaaaatactgatgaagggcatgcctacaagacttcacgattccggccgcatcatgtctcaactgatgagtttactggaccaccacacaatctagcggcagctttccaatacgaagatctttccaacggtcaagaaggtgataatgaaagcggtcaatccaattcttcacatagcatgcctgaaacggatgcacagtcaagaaatttaaattcagatgatatcgatatcaagagtatacatggtgaagatcactacggtaaattggagactacaccgattgcagataatcaagacaggctatggacccaaattgacgccctcgatgatgttaaaaaattggcaagtagcatgaacctgtatgatggtttcccaccgggttttgaggaacagttaagtaaactaagagaggcgcattcccaactgttaacaatgatgcgtgatagagatgcgctattagaagaagaaagagacattaatggaaacgatactgaaagtgctagggatttcggagttagaatggacaaagccatgagtaatggttttagccatgtaggaggccgcccaactgggaacggagagacaaatagcgttgatccaaaacgtcctggtagtagtgctagcgctggcgctggcgctggcgcaggtgcaagcgcgaattcagttttagatgcaaatacaagtgcaaatgcaaatgcaagtgtcagtagcacaaagagtcagaaacctagcagaagagagaaaagaagtactgcaccttcaatgaccgggatagatgaagacaaatatgtccaagagatgatcggtattatcaagcaattgagggcctagatctacatacacgtgaaatgcacgtgctgtggctgctgtcatcatgtacgccccagttttattcctacgcaatttctccgaagtcacagaaaatctcggagccattttttttacccctcacatgtcacccggtcattcgagaagaaaatttatttttgtaatttgtcacccctcgaaagtccattttctgtccgctcgttccacctgagggggataaaccgaaggttacgtaaggtaaggtaacccctaacgaacgtgtacgtacacatttatatataagggggagaggcacgcttattcgaaaaggtatacaggcggatcctattcgtgtaatagagaagaggacagaagaagagaatagatagaaattcggccagttctgtcatacttatagaattcttacaatactttaattcgtgatggcttctgcaaacacattttctgatttcaaattagcaaccgaattgcctgcatgggaaaagttgcaacaattgcacagttctcaaggtaagaacatctctgttaaagaggagttcagcaaggacccaaagagattcgagaaatacagcaagactttccacaactacgatggttctaagattctatttgacttctccaagaacttgatcaacgatgaaattgtctctgccttggtccaattggctaaggaagccaaagtgactcaattgagagacaacatgttcgcaggtgaacacattaacttcactgaagatcgtgctgtataccacgttgccttgagaaacaccgagggcaaatccatgaaggttgacggtgaggatgtgactcctgaagttcactctgtgttgaaccacatgaaggaattctccgaacaagttcgttccggtgcttggaagggtttcaccggtaagaagatcacagatgtggtcaacatcggtatcggtggttccgatttgggtccagtgatggtctctgaagctttgaagcactacgccactgacatcaaggtccattacgtttctaacatcgacggtacccacattgctgaaactctgaagaacgtgaatgccgaaactacacttttcctagtggcatccaagaccttcaccaccgctgagactatcactaacgctaacaccgccaagaactggttcctggaacatgctggtggtgaaaaatctcacatcgcaaagcacttcgctgccctatctactaacgccgaagaagttgctaaatttggtatcgataccaagaacatgtttggctttgaaagctgggtaggtggtcgttactctgtgtggtccgccattggtctttctgttgccatctacgtcggttttgacaagttctggtcattcttgaagggtgcagaagctgttgacaagcactttaccgaaacaccactagaagacaacattccattgttgggtggtttgttatccgtatggtacaacaacttctacgacgctcaaacccatttggtggctccatttgatcaatacttgcacagattcccagcttatttgcagcaattgtccatggaatccaacggtaaatctgttactagaggtaatgttttcaccaactactctactggttccattctatttggtgaaccagctactaatgctcaacattctttcttccaattggttcaccaaggtaccaaggttatcccagcagatttcatccttgctgctcaatcccataacccaattgaaaacaacctacaccaaagaatgttggcttccaacttcttcgcacaggctgaagctctaatggttggtaaagatgaagacaaggttaagagcgaaggtgccactggcggtctagttcctcacaaggttttctctggtaacagaccaactacttccatcttggcccaaaagattactccagctactttgggtgccttgattgcctactacgaacacgtcactttcactgaaggtgctatctggaacatcaactcctttgaccaatggggtgttgaattgggtaaagttttggccaaggtcatcggtaaggaattggatacttccgatccaatttccgctcacgatggttctaccaacggtttaatcaaccaattcaaacaatgggcttaaggataattttcaactgattaaacgcttttacgtaaaaattgtatgtttctttttttttattgttattataattatgttaatattaaacgaataattggtaatcgtgatctgtgtagatattaagttggtgctgttgttagcgatagattccgggcgatgtaagcttagtcctaatagtccaccaaacataagcacacatacagacgtacaagatggagacaataccagaggatcgccaacaacgttatacgttatggaagaaaaacacaaaactactctacgattatttaaataccaatagcttcaaatggccgtcgttaagctgtcaattcttccccgacttggatacttcgtcagatactcataggctactattcacctctttcacatcatcgcaactgccacaggatgaaaatgtcaccattgcaagcatatcaacgctgagacatgtaccttggtcgtccctgaacaattttgacatggatgagatggagtttaagcccgatctttccaccaagttaccacctaaaaatttacaaatccaattgacaatcaatttcccacacggcgattgtaatagagctacctatctaccacagaacccggacctcatatctacagcatcaagtgacggtagcgtttacatctttgataggactaagcgcggtaaaagccctatatctcatctaagaggaccttttgaagctcaactgctgccgaacaacaatggttcgccgataggtgaaaccgtggcattagactggaaccgtcaaattgaaggtatattagcgtcaacctactccaatggccaattatgtatctgggatatcaagaaattcgaaaagagaaatccgataatgagccagccctccgctgactttatcgatacagagtcccaagggtttaacgatgtctcgtggatgccatcccacgattgtctattgtccattgctcgagaagataatataatgacgcttttcgatacgagaacaaatggcaacattgcacaaacaggcccatcaacaaatcatgcatctggtattaactgtaccaaattcaacccatcgcaaccattattagtggcaaccgccagtggtgatgggttggtacagctatgggatattcgcaaattgcataatccgataaaaactataaactgcgaatccccactgtctgcacttgagtggaacccacaactgccaacagtactagctacaggtgggcaagaggatggattagtcaagctttggaacgcatctaatggtcaattactcttcactcatggtggtcacatgctgggtgtcaatgacatcgcctggagtccgcacgacaagtggctaatgtgcagtgtagccaatgacaactccacacacctgtggaaacctgctagcagactagtaacatgaatactgcagcttggattataatataaataagcatcattatcttctaatgtatcacgtgaatatcatgtgaccaaaatacacgtgaccggaggccaatcatacagagcttttcatgaactaattttttttttgccttccctcgagaggaaaacctaacaagcaagagaggagggaagctaacgtagtacacctaacagtaaaacgtccgttagaataggttaaactttatcgttgggaaggcctatcttttttaaaatccatagggataagcagtaccagaaatgagcttgcgtgcattgactttgaaggcttccgctagacctatggtaggtctagctgctcgtagatctcctgttatgggtctacgttacatgtccacaccaactccaaatccagtagaaccaaagaataaggcaaattcaatcattgaagcattgccaggtaacagtgcattgtccaagaccggtattttgggtacctccgctgctgcaatcgtctacgctatctccaacgaattgtatgtggttaacgatgaaagtatcttgttaggtactttcttgacatttgctgctcttttcgctaaatacttggctcctggttacaaggattgggctgatgctagagttaaaaaagtgcaagatattttgaatgcatccagaactaaacacgttgacgctgttaagcaaagaattaactctgtgggtgaattgcaaaatgttcaagatatcacaaatgttctgttccaagtttcaaaggaaaccgttcaattggaagctcaagcttttgaattgaaacaaaaagttgaattagctcgtgaagctaaatctgtcttagactcatgggttagatatgaagccagtgttcgtcaattgcaacagaaacaattgacccaaagcgttatctctaaggtccaagcagaattacaaaatccaaaattccaagacagagtcttgcaacaatccatctctgaggtggaacaattgtttgccaagttgaaataaggggacgattaaccgcacattggggctcacaagcaacatttaacttttcatgaattagatattccattacgtagattataaagaaaattattctcttccatttttattcattctttttttttcctctggcagatcagcattaattcctagcatatgtctttgtaacgaactttgctttcttgtaaatgttgcgggattgtaggctacatttttgaatcctggtggtgctaaacctttgggattccattcaggatcatagaaaatactcttggatccaagttcctcgtgattgggtttctcagtcatcaattgatcttgttgtatttgaaggtttttatgtgcaagacaacttagacgataactaaactgtatatatataagcgcactacgaataataaaagagacatggttgatcccagtgattctttgcaagatgctaagcccaattttgatggtgttccagcccaagccgttgatgcggtcagaatgaggctagctcaactgacacattcattgagaaggattagagatgagctctcgagagcagaattaccacaatggtacactttacaatcacaattaaacgttactctatcacaaataatgtcagtaacgtccactctgcagcatttccaaggattactggactctacaatggtctatcctttgcctaacttccccacgacgtcccatgaaggtctgttaacgacactgttgagaaagaagaatattcccgaagtggaggagctgatgagtaccgccaaggatatgtcagatttagatttaaatacaatggaacatcgtgaactggaaaggtcgttacaaaatgatagagatatttccacatggtgcttacagacgcttgtcggtgaatacaggaaacatgatttcaagagttttagagaagatggtgatgctatgaatatcaccttatcgaatcataagaagccctcgaagccatttcaaattgaagatgttttaagatacacttacagaggtgaaaatgcaaataaggaaacgaataaccaaggaactgaagaggttactgttatcaattgagagataattttaaaaatcaagcgttattattgttctattagtactgatattgttattatttacatgacgataagatatttatgtcgttacgataggagttttatgacgatttcccatgtaccgaacataataatactgtttggcacagttctcatcaaatgcggtgtcagtccactgtacatggagataaaaccttcctccttaatgatcactttgaaggattggatcaaaccggtgtatttaggtttaccgttttccaatggcgcttgtctaagtcttgtccttaccacttcgtgtggataagtgactatgcttgctactaatttagctaaaccagcactaccggatctttgacaccattctttgatcttttcagacacactcttgtgcctttcgtcatgaccaaacttttcaattgatctttcctttatcacacgcttcatctgttcgtacaagatccattgtaaaatactttcaacagatcccagatatgaggcacttagacccttgtacataccacggacaccttcattcttcataatacttttaatacaatcccatgagtttttatattgtttggtcttcccagccttatccagttgtaatctggttttgatcatccaaattggatttgtagctgttgatgttgcccaacctgctgttgcacctgccataaggtgaatccaagcggcctcttgaccatcgttgaaatatcttgagtaaatatcctttgtagtaccataggtgaaaaaattgatacttcttgctggaatgacaccaattaaattaggtcctagccctttaaataaacttgtaaaaccttcctgcttgtaaacacttcctaaaattccgaatgtttccttaaaatgcacgcctgcctgtgccatataatttagaaccctctgagttggtgtacctgttttgtaaatagccttggacttataaatattttgatagacatcactttgcaatcttgttttaaccaaatcaaagggacaggttaccactgaacctgccataccaccaataccacctgcaacaaagtgtacccatggtttgactggcggcggttgttgttgcaattgtctgttatttacttttaccgctggatcttctatctccggtgggacagcatctttaaaattggaacctttctcatcactcgccagatatggcgaagcttcaatggcttccttttctaatcttttggcattttcctcccaatcttgaaacgatttcttgggcattttttgaaattttatatcataaatacaggattacttcaatacaagggctagtttcagaagccaaaacaattccggtaaatcagttgaacactattgatacgttaaattcgactctgaagaattcaacaacctctatttcccaagattcccttgatttctcttgttttcatcgtcacctatatgagctcgaatttttttcaaaggtgaaatttttttgaactcatctcatctcatctcatcgcaccatcacatggataagatcatcaccagtagtaacagaaccagcaacactagttagtagtttatgatattgaggccaaacgatatatgtgtacaattgattaaacacaattagatatgaagatatagacagtaccgtacccttagcttaaatgtaagtttcgtatggaactggagccaaagtttgtggaacgttaccctcagtagagatgacgtgagctggtcttgggccagctggttgtctcttcaattggacagcggtaccagaagccttagcggcagcacgcttagcagcgttgtccttaactctttgcaaaaattcttgtctgcacttggagtgtttgatgtgttcaattctgacattaactctcttttgaatgcatctaccaccaacgaccttgttgatcatcacaccaacagcggacttggtaacgttgaagatgacaccggtcttaccttggtagaccttgtgaggcatacccttttggatagcaccattggccttgatatcgacaatgtcaccaaccttgtagaccttcagataggcagacaatggcagagcaccatgtcttctgaagtcacgttggaacatgtaacgagtacgagatctgtaaccgtgtctatttcatatttgttagtattaccattcaaaacacttggaaacgattcccaccaatgatcactatcatcaatatttctaataatccatttagaacatacgctttacccatttttgcttgtcgtccttgggttccctagccagaagagttagcttggaagattgttcaaaatttgactacacctttggagcaatagccagttctctgcactagtgactgaaactttccggtcaatccctcagagtcagcgagatgcgatgcgtggcagagagtcggtagcgttaggcagagcgtcggcctgcgaggagagtctctactgccctaggtggaaggtcttcccagcgaggcagcacgtccagtgggagggcaccgtcccagaggctccgccgagtgtcgcctcgtggttccttccagctggtaaagcgacctgttcgcgttgcgggaccgacgcacaaaacttttcaaattgaaaaaagtaaaattaaacagaatgtatgggtgtacagaatgtaaaacagtcatttgtttgaagtctatccctcatcggttcttttcttctccgctgattgacacattttatgcatagaattgtaaacatcaatagccttccattattcccctatcaatatactattatagagtgcgtacaaagatagtaaattgcatagaaacattgttacatccgctgcagagcttgaaataacagatacaaaaatcatttcaaactctaaatatacatagcttatacagcgaccagcgtcagtaattacatttctaagcttagcagaaaatggtgtataactgaaaatagtagaaaacaaaaacaaaaaggtataactatagttacaagcgatctgtttattcttcttcttcttcgttttcttcaccaccttcttcaccaccaccgctttcagcctttctagcggcgtttcttctggcgactctacctggtctaccaccaccgaatggagaggatggagcgaaatcgatgtgcttttcagagtccaatctaacaacgaaagatgggacgttaacgatttgcttaccgacggcaatgtgtctttgggtgatcaaaactctagcgtggtggatggacttagccaaacccaacttgtaaacttgagtttgcaatcttctttccaagaaatcttctggtttcaaggccaagacataatcgagcttctttttgtcttcagacaagacacccactctgaccaatcttctgatcaaggcattaccttcgaataatctcttttggtctttttcgtccttggtcaacaattctctggcagcacgacgaatcttagacaattggaaagtaattctgtaaatttctctcttgtttctcaaaccatattcaccggcaattttcaattcggcgtccaaacgagaagactcgaatggtctctttggagtagagtaggtcttagagtaggttcttggggctcctaaagtactacgttagttaacatattcaattgttttacgaggttcaagaggtgcacacataaacactagagaatcaaatcaacatgctattagcacaagacatcatgataaccattaaagtaacagtatcacaattactggacaatttcgtttgaagtgtcgggttttcaaacgaaatctttttgtgtccagtttcttgctttaattgttgattctctaacatttatgaggacccgaacctctaagaccataaatggtcttgattcatatttgtaacgtacttggcattgttacctaatcgatgatttcctggcgtctctgatctgtgtgataattttcagtgagatgagtatgtcagttgaactttatagacatgaattggattcacttgcgtcggtgcgtcggtgagtgcgacctgaaatttttcaaatttttcagaagaaaaaacatccatattcgaagaaaaaatacatggtgtgcggatgtttatatcgtttttcgtttagagcggtgtacagatgtaagaaacagtcattaaaatatgtcgtctttaattcttatattgtcacctctacaatctttaaatacgttacgaaaataatattaatgatgatgatgattattatgatatacataaaccgatgcccacaactatcccagattacaattctgcatggaattgtttaatgacggagtccacatcatcaatacctagtggcctaatgtcacccatttgtttaatcttgagtgtaagttctttaatttggtcatcgtttagaggtaaattcagttgttccactcttgatttaattgcattccaaccggtcaatttactagcaaaatgaatgtatctcgaaataccgaaatcttcagggtttaagatttcataagtcgatgggtttgccaaaatggcctttgcatgaatacctgccttgtgggtaaatgcacagaaacctgtgacagggttgttgaaaggtagattgacttcgactgcttcagcgactaaattttcaatatcacgtagtttcttcaaattgtattttgacttgacataatctggtgcggatacaatcatacgagccatgaaaccaccaagtggcacaataccatttctttcaccaataccaagaacacatgtatcaattagtctagcacctgcttctaaagctgagtatgcgttaccaattgcacaaccggtatcatcgtggaaatgacattcaatatcacatgaaaccacatttttcaaggatctaaccaattcgtaaacttgtcttgggttcgcacaaccaacagtatctgcaataccaactctgttgacaccaatttgatccacagttttgtagatattcagcaaatcaacaatatctgatctaaaagaatcctcggatgaaaatctaatttctagacctttggatttaacgaattcaataacgtctactgctgttttagcgatatagttcatatctttaccatgagaatattgtcttaagaattttgaagtaccgataaccacatcgacaccatcgacaccagtttctaccgcaactttagcatcatccatgtgacaacgaatgtgggttaaaattttagattttaaacctaatttacaaattgcttcacaatcttttctagattgttcagatgcgactggcgaagtcaattcaatgtagtcagcaccaaattcatcaagtgcctttgcgatttcaatctttttttctgtgtcaaaaaatgcattggcaaattgttcaccttcacgtaatgtagattcaataattttgaaatctctaacgttagaaactagatcagaagcatttggagcatatgggtttgatgacactgacatcttggattaaatttcctgtagtataggtaactttcgaatcaaaagatagctgactaactgtgagaagctttataccaccaggatcagataacttgaagattaataccaagactatgagcaccacagctatattaaccctatatacttttttttttcaattgaatttttcaaccattcaattgagtcactatatgatgatgaaaaaaatacctgtggaaattgcttcatgagtaatcccggagagagtaaaaaagggaaaaaaatggatgactgtccgggactaaccatgtcgtgtccaggatgtaggaaataaaaataatattattataaacaccactagaggggctcgaacacgcaatcgaaaaatcgaaatacgtagaattcaacatgtgatattcacgtgcatcagaacggtcgcaaatagaacggcgtaagcagagaatcactagctaaagctaaagaaagaacaagatcgcgattgcctctcatgtgcttccccaaagaagccgttttacacctcgaggtttgaagtcatctattctgtctaacatacatacccaaagaaaagagggaaaaaaagcgggacgcacttcaattaccagtcaaagaaaaaaattttcactacgagcaggaggaataaggtattgcataggacagtagaatacagaagatgtattatagcatagtaaagagataagatcttacggtgttcttacatgtagacagctttgcaatactgcttcggtgtatatcatttctattccacctccatatgtatctctactcgtatcgcaagtaaaaaaaggagaggagagtgaaaaatctacctgttaccctccttttcattattttttttctttctcctttcgacattttatttttttcaacatctcatataaaagcatctgtttttgtacaatcccgtgggagggcacattttgggggcgaatgtgagaatataagaaccgggtaaccgacgcgcctagagggtttacggaaaaagaaacggagagtataaatacaagatagaggaagtaacgatataagagcgaagataatacctgggcggttaaattcttttccattacatacactattaagatagggaaagaacaaaagaagaataacaaaaaaaaaattattaggaacatactataattaaaaatttcgattcgacatgacctcacaggtttcgcggttagaccgtcaggtcatcctactagagacaggttctacgcagtttgtaaggaatatggcggccgatcaaatgggagatctagcaaaagaacatcctgaagatatcctttcgctgctttcaagggtgtatccgtttcttctggtaaagaaatgggagactagagtgacagcggcaagagctgttggtggtatagtttgtcatgcaccagtatgggatcctaatgaaaatgacggagaaattaagactgaagatgcggatgatgaggagactaatgctaaggttaaactggaacacgaaatgcaagttaaattggaggaagccgagcacgatgaacttttgctgcaacaagaagattcgagacaaacattatcattatcggactggagtttacatgaattactaaaatctaaaaaagtactactggcgtctagtatgaatgattatggtgatggcaacactaggaagcaaccaaagaaagatttaggtataaatggggaattttatgatgaattgaaagagatcaataatggtaataatggagtgaaaaaggaagaaccaggtgatgtaccacctagacaatcatcgccatctggtactagtagtaataaaaaatctgcaagaatgttagcaatggcaaagaggaaaaagaaaatgcaggccaagagctcatcgaataaacctgttgatctttcagaaagttcagtatcgaaaagtttaatgaatcaacatatgagtaaaagtaaagaagccagtatgagcccgacaacgacgccaacttcgttatcaaatcctaaattagaaattacggagcaaatggataatagtaaaatcatggtcgaatcaatgatggcccccatattagaaaagcatgaaaaagttgcaggtttagtttggcaatttcaaggtatatttgaattattattagacaatttgattaacgattcatgggaagtacgacatggttctgcattagggttgagagaattgttgaaaaaacatgcctttagtgtcagtagagttaaaggtaaatcaagagctgaaaacaatgcaagaaataaaagatctttggaagatatttcaactagacttttaacagtatttgccattgataggtttggtgattttgtctatgatacggtggtggcacctgtaagagaatctgttgcacaaactttagctgccctattaattcatttagatgacgatctatgtcggaaaatttttggtgctctagaacaattggtacttcaggatccgcaagttgttatgatgcctaataaaatttgggaagccacacatggtggtcttcttggagtacgatattttgttagcataaagacagattttcttttagaacaacatttgttaaacaacgtggttaacatcgttctttatggattgaatcagcccgacgatgatgtacaaagtgtagcggcagctatcttatcaccgatcaccgatcaattcgtaaagttggatttacacaccattgaattggtactaacaacaatttggtcgctcttaacccacttagaagatgatctttcgtcaagtgtaggatcagtaatgaatttattggctaaattgtgtaaacatgaagaagttttacacattttaaaggaaaaagctatacaacatccttcagagtggtccttcaaatcattggtaccaaaattgtatccatttttaaggcattccatttcatcagtgagaaaagctgttctcaatcttttaaatgcattcttatccataaacgacgattcaacaaagggttggctcaacggtaaagtcttccgattggttttccagaatattattttagaacaaaacagagaaattttagatctatcgttccaagtttacattcaactgttacgtgattataggtttaaacataccgaaaagacgttggatcatgtctttagtaaacatttacaaccaattttacaccttttgaatactcctattggtgaaaatggtaaaaactacagtatggaatctcaatacattctgaaaatttcccaacattatcaattacatccggagaagaaaagatcattatctgaatctaattttgattcggatataccagctcccaaaaatagtgagcgtgttaatattgatgaaccaatgattgcaggtgacattactctattaggagcagaagtcattcaaaatactagaattatgggtgctgaagcctttggtattactttatccatgtttcaagaatctactttacaatcatttttttcaaatgttctggtacgttgtttcgaattatcctatgcgactccaagaatgatcgcaggtatcattttatcgacattttgttcatcatggagtcaattacatcctgagactgaaataccatcatttattcaagaaatatttgcacctgtaattaatcctcaattgttaaatcctgatgatttacctacttttagagaattagtacccagcttaaaggcattaagaactcaatgccagagtttaatgagaacgtttgtcgacgtggggatgttgccacaacataaattcccaaatttaccaattatagttcaaggtgaagctgaagctggtccagaggccttcaacatttcacttgcagaaaaagtccataatgaatattatgataagatgtttcgatcaatgggtaactcctataagttgttagctaaaaaaccacttgaagatgcaaaatacagggtgtttttagctattgaggccgctaaggagtctagaagagctcgtaattcaagcattctttccaactatgcagccgcttccctaaggtttggtgggttgccaactaaattgaaccccattattagagcatttatggatagtatcaaggaagagaaaaatggtaagttgcagcgcttggcaggtgattctatcatatatctgatcaagcagttactggagaacgatagggccaatgtcgctaacaagatctgtaaaaacctttgtggatttttatgtgtggatacttctgaggttcctgagtttgctgctcatagtcaattgaaggattctatgctaactatagttaaggaaaattcaccaccaccctcacctgatgatgtccatttacaaagattgaccgaagaggcacaaataaaacgtagaggtggtctttacacgttaggtcaattgttgcaactatttggatccgaaactttccaaagggttactcaattccacagctgtcttttcgaaccattggataacagtagtgaatggaaagagaaagattctttgacagatgtagtaggacaatctgtggtagacgcactgggagctttaagagctacttattcttacatgagtggtgaattgaaaacaaatgaaatttggcctcgtttccctattcttttagaattgttgagatgccgtttttctgtgattagatattctgctgctagaactttcgcagatttagctaaattatctccaattccagttatgacttttatcattagagaagtattacctctattgaacagtgcaggttctactattgatcgtcaaggtgctacagaattagtgtatcacttgtccatttcaatgagtcatgatattttgccttatgtgatctttttgattgtaccacttttgggtcgtatgagtgattccaataccgatgtaagaagcttgtctaccacaacgtttgctctaatcatcaaattggtaccattggaagccggtattgctgatcctgaagggttaccagaggatttgatggctggtcgtgaaagagaaagagattttattcaacagatgatggattcttcaaaggcaaaaccattcaaattgcctattgctattaaggcaactttgagaaaataccaacaagaaggtgtaaattggcttgcatttttgaacaaatatcatttgcatggtattctatgtgatgatatgggtctcggtaagactctacaggcaatttgtattattgccagtgatcaatatttgcgtagacaagattatgaaaagactcattctgtagagactagacctctaccatcgctaattgtgtgtccaccttcattaacagggcattgggaagctgaatttgaagagtattcaccatttttgaaaattgtcgtttacgctggtggtccttctaccagatacccactaagagataaactacatgaggcagatatcattgttacttcttatgatgttgcaagaaacgatttatccgtgattgcccaattcgattacaattactgtattttagatgaaggtcacatcatcaagaacgcacaatccaaattggccaaggcggttaaacagttcagatccaatcacaggttaatcttaactggtacaccaattcaaaacaatgtggttgaattatggtcattgttcgacttcttgatgcctggatttttgggaactgaaaagatgttccaagaaagatttgctaaaccaattgctgcctctaggaacagtaaaacatcttctaaggaacaagaagcaggtgccttggctttggaagctttgcataagcaagttttaccattcatgttaagaagattgaaggaagatgtcctttctgatttgccaccaaagatcattcaagactaccattgtgaattaagtgatctacaaaaacaattatatgaagatttctccaggaaacagaaaacagttgttcaaaaagatattgaaaatacagccgatacggataacaagcaacacattttccaagcactgcagtacatgaggaagctttgtaaccatccagctcttgtgttatctcctgatcatcctcaattgaaacaagtggaaagttatttgaagcaaacacatatggatttacacgatatttctaatgcccccaaattacttgcattaaggaacttgttgttcgagtgtggtattggtgaacaagatatagatagaaaatcaccagtgaaccaacttccttctacggttaatgttatttcacagcatcgtgctttaatattttgtcaattgaaagacatgttagatatggtcgaaaatgatcttttcaaaaggtacatgccctctgtcacttatatgagattagatggtagcgtggaggctcgtgataggcaaaaggttgtaaggaaattcaatgaagatccatctattgactgtctactgttgactaccaaagttggtggtttaggtttaaatttaacaggtgctgatacagttatctttgttgaacacgattggaacccaatgaatgatttacaagctatggatcgtgcacatcgtttaggtcaaaaaaaagttgttaacgtttacagaattgtgactaaaggtactttagaagaaaaaattatgggtctacagaagtttaagatgaatattgcctcgactgtggttaatcaacagaacaatggtttgtcatcaatgaacactaatcaactgttggatctattcgatacagataatgtgccatcacaagaaaaggaagagaagccatctcaagccgctaatggtgaagcagggattgaagaggttgcaaatgagacaggtttatcaggcaaggctaaagaagcattgggtgaattgaaagaattgtgggatccttctcaatacgaagaagaatataatttggacaatttcattaagacacttcgttgatatagtcgaaaaaaaaaaaaaaaatgaaaatgaaaaattgcgaaatattatacaattgtatcgattcatcaatttgggcatagataaatataaatgtatgtatgtaacactagtgcgtatttaacaggggaatgttatagattttctattttattatcgtcatttgacattttggagatgaaatttgaaattcggaccctttacaaattcaaaggatctttctgtacattgaatgagaaacaatgacaactatacaggaacaaatcgatgcaaggaaaaggcggctagagcagctgaaacgattaactaatgttgacaaggagcctcctaataacgctaacattaaaagttcagttgaaacagttgactcagcccctgctcaaattgagcctagtcaagcagtaagtaatacagatcatggaaataagaattcacaggattcacaacaatcccaagaatcccaagattattcaccacatgatggaacggaaatcatgagaaatgctctgagagaacctcttgatgaattagatagacgaacagataaggccatccagagactagtaagacagaggttaatctcagacgcaatgaaccgggaatgaacatgttctaataaataattacctacctatagacaatatacatatatgtagagttaagaaagccgcatgaatacattcgtattactgttattagtccgtttggaatgcctcataaatatagtgaatggcaaagataaagaaagagaaggcaccacctaatgtaaccgttctcatactaatttttgtagctaaaaatttaccaccgaccactgcaactccagtacaaataaaatgacctacaaccgcaccaaagatcacataccaataattgctgtcagaagccatagcaatgatactaatttgagaacgatcaccaaactcacctagaaaaaccatcgagaagatttgaatccaaattggagagaatagtacggataatttttgtgttactagcgtcaacgcatctttccaatctttaatacttttaaaacgatttttctctacgaccacaccactttctaagtctgtagcattggtattcaagtcattgactgcaatttcttcctccacttcagctaattcatcttcaacaccagcatcctttgacatttcaagcccttccaatgtcaatttataaccgaagattaagaataacatacccgccagaaaacgggtataacgttccgatatgatagaaacaaatgtgtgtccaaccagccctgataatactgtcataatggctagtgaagatgctgccgatgaaaaaacaagccatctagtatgacgcatggccattaatgcagcgattaagaaggttttatcacctatttcagagacaccaatcatcgaaacggccatgaggaaagatgtgaatccagattgaggtagattgccaccatctgctgcagagatttctgtagacataattgatatcaggattttgagcagaaatgagatggactctctctcaatagaattggttcgataaaggaactctgtcggtcaaatcaattgcccaaactatcaatttattgggatcaataaatatggtgaagaagcgagtgcgagcagatactgaaagtttagctttgattttatcaattacagtcttctaatttttttttcctatttgtttttcttgaccttataacataaagagggtaaaaagcccgaaacctttcataatgataatggagaaataaccactcattacacgtgttgtagatctactactgaatgtgcaagtgctaatacgaaattatccaacctaacaggcagttcttgaaaatgctctgagaggcatatcaacggtaatttccttaacatcctaccgcttaccccaatggtctattcaattgttagtagccgtaaaaaacgcaattatcggatataatagaaggtgtcaaacattaacatactgaacatttctctgcaattgtcattaatgcttctttgtaaatgggattttccattgtagatttgggctcttcacataaaagtaccttttttgaaattaagtcatccagactcgatgttaatattttggcaataccaccctttgaaggattaccgatatagaacacaccatcggctctatcgataaaagcaggatctaacgattccacaaggttagaagtggccaatactaaaaaattattgtattttttcagtaaatctaattgagttaagagggtactaacaactctgacgccatcagttgattcgtttttgttcattagactatttcttgaaaatgcaatggcttccacctcgtctatcaaaagacaaacaaatgaacaatcctcttgatgaaattttaacagattttccacatctgcaaatatagtggccagatttttcgatgattccccaaaccatcgggagaagattcgggaacatgagatttcaataacaacacctttataattgttactgatagggtcaacatcagaggagaaatctttacgaatagacaatttttgacacaatgccttgcagatggtagtcttaccagttcctggaggtccctgcacaagtaaaagcttattgttggcaaatgcgctagatccgttttcattagccgcgttcgtaaaagttgcaatttttagggcaatggtcgcataactgtacattcgttgtttaattctgtcatcgaaataaagtgattcccacagaccttcgagttcccttgatggtagtaatgttactctcgtctgtgataaagtttgtctcgacagtggtaaatggctcatgattcctgatggtattagacttgtacctaaagtatcaccttcagaatcttcttcaccatctaaatcgatcttgtcgaactcttctgataacaatttactctcctggaagaagtttgggacgtcctccaaacagcaaaacaaatttatgttgaaatttttgttcaaagatactgatttttttcgagaagcgctaatgtcctcagataggttcaccactgcatgtacagagtcattcaatctaccttgagacgcaattatcacggaagcttccacaaatttatcacagtaaatcttactgatgaaaagtgataatagaaggttggcctgaccttgatcaacatcatcagttttacttacagacatctggtggaaaattactttaattaagcttttaataattctttcctgtgctactgtcggaggatccctaacttcaatactgccatgtccctcagctaaaagtgtatctgagaataataccaagtcttccaactccttatcatcatatctggacaatctcttccctattaccttctttaaaacattgtaaaagacatgcatcttgtgagacagagtagccgctggggctttaaatcctttgagatctccttgaaacctgcttcttgattccgtctcctcttttagagcatgtcgtactaattgaaccgtactgcctctaatgtgcgcatcaactatatataccattcttattccttatacgtctcgtttttgccgccgttcttgatgtggtggcaaatggtatagaaatttaaccgccgagctttcccgcgttttatatcccggaagggacgggtaacccgccgaacttccgtttccggtaaccagagccgggcgcctcgcttatcagtagaccttcaacacatttaagaaaggtataaagataggtcaactcaaaaaaatcctacatgactactcttgatactatcctcgacaatttcaagggtctgcttctataatcactttcactatgccctgctgcagttctcaaaacagtgtcaagtctgaatgtcaaaagacatctgcatcagttgaaactaaatctcaaactcaaatgtcctgttgtagtggcaagacagcaaatggcaaaccaactagatgcaagtgcggttctggttgcgagtgtccatcttgtaatactacaaagctttaaagctaacgatgcgaattttcatacgttttcgaaaaagtttatacacgatacggtaattttatatttatataatggcttaacataaatattaaaaggaaggttgttaattggatttcagtcgagtttctcttcaatggaaaaggacgaggaacaggatatcaggcttgatacagcccctgattccgatttggaagacgatgaattaattcaagattggtcacaagctgctcagttatcgataagatcatctacattgcccaagagaggtgagaaggattatgaacctgatggtactaatgtacaggaactactactgtacagagccagaaaggcaatgtttgacactttatctaattctgccagaggttcagtggttaaaaacttggtaaaggcctattacgatccccatgaacataaagctttagtattaagaccaaaaggtaatttcctacatacattgggtaaaatgcatagagatgggacagtttggttggaattccatgaatttgtatatttagctgaaagaggtagcataacgcccttttacaaaatggatggtatcgattggataaaccaagaactcccgttaaccattgaagacctttacatgctgttcaaatcacaggaggaattggatacattctttgtatttgaacatctaaaaaggctagggtttatcgtaatgcccaccaataactctttagactcattttttgaacctaaagttgggaaaaattcaggacaagctctttcgaatacctggaacctgctacctgaatggaggaaaactatacataatacgatcttttacagtccctggaaattttggttaaacagatacacctcaaatcctcaaatctatcagagtttaaaccaattgataccgtcttatagagcaccaagaactgaagaagaattgagacgaacaagatttggaagtatgaccaagaaaccttccgcttttccaattagcttaaatgtttggaaaccgagaacggatttcaaaaagaaaagccctggtattcctgattttcaagttgtcatctacaacaaaaacgacccaaatcaacattttcctacttatcacgaattacaggaaatatttcaatacctggactacaaatttgaatttttatcagaaattgacgataaatgggattgggatgaccattcttatcacgatggtaaattaagaagtcaaacagtagctaacgtcaaatcaaagaatgccggtgttgccgcagattccaaaaaatcacagaaggtgaaaccaaagaggaaacctaagcctaaatctccacgagttcaacaaaagatacggctgaaaaatggattccgtagtttcctcttggcggttatggatgatggtatgataagttttatcaaaatctcggaaactgattttggttctgaaaacgtttggtatgtaccacaactaacaactaaaaagccaactttataagccttttcgcccctttaatacatagttctaataatgatatctacccactgaatttggagtacaaattttcatcgaatactgacggtctgttgtaaaaggaagttggattttgttgcaactccctttcctccttttcaaactcttgctgtagagaacgtcgtggaccaaactcctttggaggaacaggaggtgcaagtgaactgttattgccaaatactggtgtggtctctactgtaggacgcacaaaactgctaccataggttctcggaggtatcataggtgtagcggggatggaagatgaaagatttaaatttttgaattgagattctagattcacttgacgaggatcagcgttactatttgtagcggatcccgtgagcggttgcaccacaggttgtgaagccgccgaggacgcaagacctttactgatctttaataaagagtcataaaatgccaatccctttggcaaatcagcacaaaagacagcaaaatttgctacggcttcttgtattttatcaaagaatctctggcgttcctccatacgtagcttctcttcccctgatgcgtcctccacaccagaaagcttagaaatttcatcgagctctgctctcatttcacagatggtagcagattgtttgaaaacagtagcctcgactctagcactgaaaggcttgaatttttccaattctacttcaaacatatgtttgagttctgaatctgtagaacctctgttaaccaaaatctttttggtaatgtcatcattgttagcttcctccttcaattcacttagacttcttccacgttcctccttgagtagcctcaaatcttcacacaattgctttaatttacccaattttgaaagtactgcctccgtcttagtgtcatctatatctaagagactaggctgattggaattgtctacctcaaatttaccccaagttgcccagagtacttcattattctttaataacttaagctctggaatgaatggtttaaccaatgaaaaaagcttatcgtcagattcagaagcctccaataaagcagacttcaacttgacagtattctccctttgctcaggaggcattgtagacaaagtattcataatcttttgtcgtatttcattgattttcctcatctgttcgtctacatcattgaatttactatcttggacggttctgctccaggaaatcaattgatctttcatcatatccacttgaggattaccggaacccgaagtggatccagttttatacctagcctccatatcagttataaatttcggtaaattagtaaattccatgtaggaagtgtactcccaattggcagtttccgcaacatctatctcgtttcttagaaaacgtgccttttcctctgaatagatactttccttttcatatatctccatgggcacgattccctgatacagcgtatcgcatttttctgcgaccatattcacatatggttccaactgtcctggaaaactagtagatttcacggcatccatcgattttattacttctaattgaacactctgcgggatggcatcatgatagatgaaatcgttatcccttgtcacctgtctctttttatcctccaactcttctttgaaaccagtgaaatctataaattctttcaaactgattttatagggtaaagacgatacaaggtaatcaccagccaaattcagaaatgctatagcctcaccatacttgttctgctgttcaagagcaacggcatagtaataagcagttactgctttgaaaaaaaacattttacaagtaacgagcgacctccatttgatatcaccgtaatctctaacctcttcatcttcatcctcaaaaaacccatggcaggtctcgtaaagtgatgctgcagcataagatagtttactcacgagtgaagcttgcttagtgggatctggaccatttatcaatttcaacaaaaacaattcttgagcctgtgcatgacagagttcagccaagaatttggtaatatctgctcgtaaatccaaggatggggaattcaaaaagttttcagaaagatattcgaaacatgcaactgcattcattaaataggttaacgatgccttgtaatccttattcactttttcttttgccagttccgtaagcaatgcaccaatattgtaaagaatgcacgatttctccaagattacgttgtactgcgaatgtttttgagccttgagtgcagaatcgtattcagcttcataccaagtaaaatggagtcttagttgtggactgttatttccaatacggagatgtaattgttctaaaaaggcataatagatgaaattctgctccagtaacgcttctaatgccaattctccgtttgcattgtttctaagatgatttaattcacccgccaacttgtcgttgtagaactgtgaccactgtgcagaaccatacgatcttttcaaataggagactaagccctttttccaatcaatagcttcagtatccttgagcttcaaggtagctagacacgctttcatcgccgattagagctgctatattgtgatcttgatgacaagtacggctccaaaagcttagatttcagtcttcacccaaggcaacccctgtacgttaaagatgaacaggtgccattttaagcacgtgaatatcatgtgatcagatattttatggagtcacgtgagattcacatgatcatgaaatgctcttcaacatctgatgaaaaaatctacgtaagaacagttgaagacgatgcatctgattgaccagcttcatccacatcattgtagcccttatcctcgactcggatcactgctttctagtatcatgatcaaatccgtcacattaggcttaacttcgaagccacttctgtacaaaaactgtatccaagttcgtcctctttccagtactagggtcatacttgaaaagagtaattccaaggccaataaaactcctgtggacttcaatgcaagacatctaggtgtctctactgaagtatatgttcctccatcaattggtaatttacctagcgttttttcacacccagttgtggtatttaatgcacttataagaaggatttatacactaggtttgaacacagtgcaagtgggtattttccgctaccaatctggattaaaaccaaatttcttactttggaagaatagagccattcaaaactatgtgaatgtgaatactgcatttgcccaaaaaaaggtttcaaacgtcaagtctcaaatttctctatgggtggaggaagctcttgaagccagatcaaaacaattacccaaacatatgcaattggaatggcaattggtcaaatttaatgaagttcctaaagttgtttctgttcaagcgatgatgattcctggtagaccattggaacatattcaattgatctacagatttaatacaaaacagagattaattaagttgaataaaaaatctggtaataccgacaagttggacagagacgtggtggattatttagtttatctttgtgatgcttccaccaacaacctcattctcatgggctccgttttcgaaagtcgaccagacagtaaattaccaaagaacttagaagacagtactcaagccgccatccacaggatgaaaatgagcggagacttgttcagactgccccctcaatgataggagcatatattctaaatcgtgtaaatacttttgtgatcttattctcgtttttataatctataaagaaatgaggacgaaactttagaagataaaatatctcactacaaatcatttcgtttccatgacattgacataacctctacctggcttcttcttacgtcttgtggagccagcagtacctcctgctaagttcagtaaatcatctagaccattggctttcttccctgctaaattgacaccggaattactagaagatggaggagctactgatgatacttcagagctactatgactggtggtagcagagagggcaggagacgccaacggttcaccagtgataggatttttaggagccacaggaccaggtacaggtttaggaggagcagtcagacttccagagcgaggcttggtctttggaccattgtccatacgtttaaccacaggaggaggaggtggtggggtggaaaacgtctccttttcttcctcggttgcattgttgttaacccaacgttttaatttttcatcataatggaaattcctctttttattacccagcttggctttgattggcttcttctcattaggatctttcttcaaccagctgaaccaaccgctagaagatttctctttattttctctgtcctttttagccttttcagctctttcttgctcacgacgttcttcttcctcctcctcctctttggccttcttttcttcttcttgcttacgtttcacttcatcctcatcctcatcttctgactcatcttctactacatcatcatattgagtctcaggaggctgcacaaccattggggaaaatgccctgacttcgggagttctcttgattacaggttcgaaagtctccgtagaaacttgctccggttccttcgccggatcaaatctactgattggattaggcctatcagttgttgaactctcttgcttcaaggcgggtgtggagaaagcttcatgaggtgttgaggaactgttaacaagttcatcttctttaacctgtttggaagccccagtttcttccacaaacatacccaagccattgacatccacctctggggtactttgggctttgagtgcaggagatgtatcttgggcgacacccttcggaaggtaagacctcctactagacgaagctttccttacagggctgttggttgcatatggattagttctaataataggaggtgggtttactttacctccagagatggaattaggttcagatgcttccattctaatcccaagaccagcctcattcttcgtagccgccgcaggtgtttttccatccaccgattgtgacgcaattggtgggctattggcagagactggaggcagttgtcgtccatcaggctttctcaaagtctcaccagaacttttttcaaccatagctggggggtttgagcttactgaaggactatcccttgggggtggtaccgcccatgaggattgataattacgtagaacggtacgctcagtgtcactatcttcctccgtggcactttctgtggctaccgttgaaacaggagaactctcattaccatggagcacggaatgagctcccaaaaatggtctctcagccaaaagttgatgaccatcgttagcaatcttacgactagaactctttggtaaaatttccggaggtaaatcgctctcctcagatgattcctccaattgctctcctaacaatgacacatcggccaatctctttcctgcgtttacacttcccttgcgaactgaagaagtatcagaaacagctgaagatcttctcaaaagatttggagttgaactatagtgctgtgacttcttcattgagggtttctcaccatctgagagagtagaatccaaagtttcctgagcttttccgctgaaaggaggaaattcttgttggaaatttggaacattattcgaagattctggagagaaacccgaagaagaggggaatacacccccaataggttgcatagtatgaactcttctcagttgaggaggtgcactccctgaagatgttgcatgcaagggagcatattgagaaaccttcggagaaccttgatagttgttcacattcgatgggcgacgaacatgtggttcaggttgacttttacctccatagacttcctcgatgggaaccggattacgaattggactatgtccaataacctgtgcagggataattgggtccgactgaccgtaagaaggcttttttgaatggccctgataaggaacaaatggagtttgactcaaatcaattgtagaattgttcctagaggatacgggtgtgaaaccatcaaacacttttttaccggaagatttcttcatcaaggaatcatcgtcgcctccaataaacttattaaacgacttatccaaatgaccccatacactgcttagcttaggcttacctaaccagcctgtagaagtacctgcaatagaggcattcaagttgttcagttggttagttagattaattgagaaagcgtcttttctcggaagatttctcaaggtgccactcaaataatctgtatactttgatgctgcagtcgtgagtccacgctcctgtaagcaggcagcatggtgaagtttttgtgggattaagacggggaaggctttggaatctgcaacacagaactcataaatttctgaaaatatcataccctctagagaatatggactgccaacaaactcaaacttcacgtcaacgttaggaagaactggagttgaagatagtggtaagttcgcaatcataaatagaatgcaagcaggtagcttcatttccttacggtatagaaaaataccgtattccaccaaaaattcaaccacaactggcggaacttcaaggttaccggatgtaggtggggcgataccagaagtaacattgttaagcacagcggctaccaccattctccaattttctagggcccatctgccttttgcttcattgacataaaactcctggaaagcagtcttagagctcccaacgaaaacttggaaaaccaaagaaagcaaattggttaaaaacatggagtcatcagcggctatttcgatctcactggctaagtagcttttaaccacctcagaccatttttctttacccatcaaacttcctattaacagagccatagaaaaatctttcatttccaacgcaagttggagagcttcttgttgtccaccagtttgcaaataagcggatatcctcatctgattatttgcatccaacttaccagcacttggtaattgcttgggttgcataacaggttgagacaaatagaggaataactcatcggagttgtacaagacccttgaaatatccttgaaatttatattatcggtcaactttaattttaaaagagataataccgtcaaacctaaattattatcgtcagagaattcatctgcatgatcctctaaccacttctgtagatccttcccttttgttttattcttaaccaaaggaccagggaaagacttcaaaaagtttttggagttcaaaactgtatccacattaacaagtttgaagtcttggactgacgaacttgacccaaggagatatgcattctgaccattttcactggaaattccgtaaagaaatttttcagaagaactccaactaaatagagggaactgatgctgtgaaagagcctcattatcaactggcctaggtatttgcgcatcatgcggtctactaacttcttgaggttgagttgacttcatataggcattgatggtagacaaaggatttggaactccaacaggtcctgcagggggtgatgtgtactgatattgagggtgtacagtcggagcatacttcgaagtatattcattttggttaggagcataaacgcttgaatttgatcttgcatgtactctgtttgctgtctgtcttcctctaccatttatggggggagcaacattggcagaagctccagcaggcgataaagcttctggagctgcacttgttccagcagtggtaacattagcgccgtaaggaggaaaaggtatattttgagccgccattggcggagcattgggtaaaggtaaattctgagcctgctggggtggaacattgccaacgggcttaggaaatacagaaggaataggtaacggcttgctcatatttggtggtgcataaggtccgttaactgaagccccgacatttactggaggaaccccagcttgtttagcactcattggacctgcgacactcgaagctggagggtagactgctgctttagaaggagaatttggagcgtacttacttgctggtccgactggaacatgtgggggagaaactgaaaagcctggaggaagcgatgctgatgctcctgctgatatcgggccaccagctgacacattagagaaccctctcgttctaacagcgggcgcatactgcgacctcgtagatgattttcggctaccaggcaatgggacagcttgaggggctgtcagttggttacccaatggcaatgtattttggggcagaacgacaccttgagggggtaatggtgactgtattttactcttagaggcattggctacagcagcatatggattacttggtaaagatgcgacagagttatttctactgcttcttggtggcgcctgaccacccagttcaaatggcggaggagaactaaaatgagaagaagggactcctacaggtttagcatgaaccttttccgccttcttactaaccagatccataggaaaatcaaatgcatctgattttttcttttcttgattaatcttttcgatgaccttctggccctccacaatgttacgttgctgagaacctaaaccagatgacacttggggttgagggggaacgatgctggtaccagtatttgctcttaccgcctgagggggcacaacagtttggaacccatggtgctgcaggttctgaccatttgcctgaggtatattacttggtttgtatctcgaggttgcctcatgagaaaaagttggagagttgagggaggaagcagcagcactgctagtatgagtctgaggttgttcagtcagcctttgttggttattggttaattcagaagtcactgttcgcacaacttgttccttttcatctgcattttcctcgtctgattccagaaaactatcatcatcatcatccaacaaatcatcatcattctccaaaaatgaaaatttcttgggttcgacctttccctgctgaatatcgggatttggttcatttgttgattggctatcaaatggagcctgagcctgagcctgagcctgagcctgagcctgagcctgagcctgagcctgagcctgagcctgagcctgagcctgagcctgagcttgaggttgaggttgaggttgaggttgaggttgaggttgaggttgaggttgaggctgaggttgaggttgaggttgaggttgaggttgaggttgaggttgaggttgaggttgaggttgaggttgagcagaggcctgagctggtacttgaacttcccatggcattggctcatgttctgactcatcaaaaagcgcatctacctgacctgcatcaactaaaggcttttgttgatcattttcctggctaccattagcgctaacatctttggtgatttccaggcgattcgcttcagcagcttcccagggcattggctcttctatctcacttgattcaccaaagagtgcatcaacttggccattatcctccgaagactttcgcactgctctttgatcttgaaactccttctcattatctttcttcgcatcatcccccattgtattatcctgactatttgcttcagcagtttcccagggcattagctcccgcttatcatcacccggatcatcaaacagtgtgtcaacatgttcttgttttgattcttcaggaacatgggcgttttttgcagtccttgtttgcatttcctgattttgagttaattctgaatcatcttttttttgaatttcctgaccttcattaagttcggaatcatctttctcctcaggactcgtcgctgaagattctgcggtgggttcagcgggttgaaaagtttcccatggcatcttctcctgttcctcagttccataggaccccccaaacagctcatctacctcattaccggactctggtggctcatccttcaatgctgttgacatatgatccgcgacttccgcggacacttgggtcggtccttgtgaggaaacaacatttgaagatgggacggactcattcgtatgtgtctcagatattgatggatcttgtaccgactctattgaaacctgttgtggcttacccagtgcactcttagcttgagacacctcttgcacaacatcatttacggacgactgttcggtattaagctttttttcctgtgcttgatcatccgtcgagtactgttgagaaacagattgtttaaccccctcattttgttctgtctctagaggggatgatgcattttctaaaacattatcagtgggttcggggttctcccaaggcatgggttcttgggattccccagtgtctactccactaaacagttcatccacttgattgtcattatttactggctcaccagttccctttattggaatctctggttgtgcagaagctccattttcattcaaagactcagaagtagcctcttgttccattttttctactgatgaaggtggtgatgactgaactgttgaatccgggatatctgaaatgttttcatgtggcttcgcttgagctggctcctcatcttcagttgaacgcctcattccttgatcttcacttccctgtgtttctacattttcttgctctacggacgcttccttgtccgattctattgtattcacagggccccgttcattagtttcaccagtttcttgatccgttttttcttgatcctgtatgtgttcgacttgttcttcgatttccggtttcccttggtcttgtggtagttcatttggcgaaagtgaccgatcgattgtatgtttccttgaggggaaaggaaagctattttgtatccttgattcctgatcatttcccgattcttgattttgattatctggtaaattgaaacgaattccattcccttgatatgatccactgattgctaccggttgcaaagcctcttgttgttgtgaaactattgctgcctcatctggtttcattcctgtcatcgactgtcttttaatctgcaaacttactctacgttcgatggatccttcaagaagtacgtcattttctgatgtatcttctgataagtgagcagctgcagctgcagatgcagatgcagatctatggtgtttttgacttgggagacgactaataggcagatcaccaaactcttctatagcttcctccccgtcatcataatcatcatcattatcatctcttgaatcttgtcccctactcatttcttcgtcatatcgttggtctggtgacagttcttcgtaatccgaatccactgcaagttccattgcctgtcccataggttctggcacaatctgtggtgatcccaatctatctacttcatcctgtgatattatttcttcccttccgtctctgaaaatgtgtggaacgacttcctcagcagcgactctatctacaacaaagggagctgcctggtcaacggccgcatccaattcatccccattggtaattgattccccaacagctgccttatcagcagcagctttcttctccttctgctttaacttcttcttctgattcttccttcttttagcgtccattgtcataatatctcgtttctactcaaaggattgtaacagccagtactttatccattcgctggtaaaatagagaaaatgcaaaaaatgctacacagtgagaattgacctctattatacccttatcaatgttatctgtcttagcgtttctctatatgcttaggtgtattcacgatttcagagttgatcttttattctgagccttactgcgcatagtcatcaaatacgtaatggggtgatagaaagttacccaaatattcaataaaaagaagaacggtaaaaagtaagcggcaaaagataagctgcaaaagggccagataattccttgagcttttgacgttcaatcatctccttaaagtatggtatttagtccaaattagtgatcacgagaccaaacatcctaacatcacgatataaccgaagctcgcattcagatatcaatgaaaaaaaatctaaagtcagaaaagaaactgattaagtattctacatccagctcatcgcaagcaaagaaaaaggtgaagaaacccatatagatcatggctcctggtcgtaagggtcctaaaactaataagcccaagctggctcctgaaaaggagagattcgttcagtgttgtgctgatattacattagagttaaccggttcgcttacatctggtaagacatcagagattaatttgaacggacttatcacaaaatattccaagaaatacaagttgaaacaacagccaagacttacagatgtcattaatgccattccagaccagtataaaaaatatttattacctaaattaaaagctaaacccgtgagaaccgcttcaggtatagctgttatcgctgtcatgtgcaagccacacagatgtccacacatcgcatatacggggaatatttgtgtctattgcccaggtggtcctgattctgattttgaatattctactcaatcttataccggttatgaaccaacatctatgcgtgccattagagctcgttacgatccgtatgaacaagctcgtggtcgtatcgaacaattgaaacaattaggtcactctattgataaagtagaatatatcattatgggtggtactttcatgtcgttaccaaaggattatcgtgaagattttgtgactaaactacacaatgcactttcaggctacaatggtaatgatattgatgaagctattcaatattcacagcaaagtttgactaaatgtgttggtattaccatcgagacacgtccagattattgtactcaaacacatctagacgatcttttaaaatacggttgtacaagattagaaattggtgttcaatccatctacgaggatgtcgctagagatacaaatcgtggtcatactgtaagggcagtttgtgagacgttcagtgtcgccaaagattgtggttacaaagtggtctctcacatgatgcctgacttacccaacgttggtatggaacgtgatattgaacaattcaaggaatatttcgaaaatcctgcattccgtacagatggtttgaagatttatcccactttagtgattagaggtaccggtctttacgaactttggaaaactggtaggtataagtcttacaacgctaatgcattggtggatctcgttgcaagaatcctagcacttgtgccaccttggactagaatttacagagtgcaaagagatattccaatgccattggttacttctggtgtggataatggtaatttaagagaattagctttggcgagaatgaaagatttcggtactaaatgtcgagacgtgcgtacgagagaggtcggtatccaagaagttcatcataaagtacaacctgatcaagtagaattaattcgtagggattattatgccaatggtggctgggaaacatttttgtcctatgaagatccaaagaaagatatcttaatcggattgctacgattgcgtaaagccagtaagcgttacacttaccgtaaagagtttacttcacaaagaacgtcgattgttagagaattacacgtttatggtagtgtggtaccactacactctagagatcctcgtaaatttcaacatcaagggtttggtactttattgatggaagaagcagaacgtatcgctagggaagagcatggatctgagaaaatatcagtgatctccggtgtcggtgttaggaactactacaccaagttgggttacgatcttgatggtccatacatgtcgaagcgtataagctgtgatgactaaaatatgtaaaaagaaatatttaaaaacatctgtattaaaaccgtttccccttattgtattgtaagttcgcattcacacagcttcctgcaaattgcaaagaatattttgtatgcactctgtcattttttcgaattagttcaggtacaaatccccacctccaaatgagtaagtatctgtggctcaaaccttgagtttgaattcttaaatattgtaggaaaacgatataacaatagacaccagcggcagttagaagatgccaccaagcatgaagttctaaaaacatccctagcggcaattttagccattcacgccttacgtgaatccaaaatgaacacagttgattatccatattccaagagacgaatcctatgaagaaaagtaacattcctaaggccatacattgatacatgctttttctagccaaatcgtccctcacataatcatgagcatatttccctgatagtatgaccactattactgtaaatgcgccataaacggtttgatggatttccgagatttgtgtaaccaaatagaccaaagtcaatattaaaacaaaaatggttaaggaaagtccaatattaaactgtcttttcaagggagctttacgaatgttactaccgggttgtaaagtatctcgattctcgcataacaatgaccatgtggggatacaagtagcgtagatcatgggtagttcatccagcaactgatagcggtactgtaaagtcatatggaataaccatgatcccacaccgaccagagcaaaaccgaatccgatcaaatgaaatctaaactctaacccatttcttattgaacaatacgtagtatacaatgccagcaagacaaagcaactgtttgttatggtatttgaccattcggcgatgtagggggaaacaacatagttctcttcacaccaatctattgtagaagttattgtgccccaatagccttgacttggttctggaggatatggttttcttagtccaagcattaccactagatctttatcctgttcatagaattcaattctctgcttgtgggagtagccatttctttaaatatctggggtattttgactcgtaaaacatgggaatgtaaggttggtaaaccagcgaatagtaatcaagaaaaatcatttaggaattcaaacgatttgttggattagattaaatcattaggggattactgtatgataaacgaaagcgattatcagaacaatccaacccattttcaacttcgggtttgccaagcctttttgctctcagcttcgtgtggctttagcactatgtgatctacgtcaaacaaatgaatatatataccaattaaataaacgcatgtagctggcggggctccttcaagaaatctgtttcttcgggagtaaattaaatgcccaaagcctctacaaatgaatccacaagtacaggaggactgaatctaatgattgatacagaacctttgcttaaaactcaaactgttacagccgctgccactgaggtatgtcaacccctggaaaaaatatctaccgatgtgttgacaatctctgttgcatagcacttaattccggatttctaataaagtgttcgatagtcttacagatgtaattcatgttcatcctcctcgtacaacaaattataataagggagattctgtagtagctaacgccgaagaaacaccaacttaataagcggagcctcgtatggaaaaatcgatctaggttcccaatctttccacaggccccttaaaactgacaaacatctataccggataaacccgcttgattgacgactttaactttatccgttaccgaaatattaaaatgattgcaacttctaaacgagaatgtgtcaatgatcagttagatcaccaaccgcaccctcagtaaaatgcgacatccttaacggcgctcacatttaagggcaaatgtggaaccactattgagagattgcttcgttaaccgccgtagaccggggaaaaaatggtgtcaaaatatacttttcaccattctcgaccgacgcttacccggtcttcggacttcctgtgcgggtgacttctattttttaacatttgcattgtacctcataaaaataaacgttaaatatagcagctcccatcgtccacacaccaacaaacaccatagatcttaaaaaagagtacaatatagtatagagtagaagacagctagaaaaccttcagacatctcaatatgggtagacgtaagatagaaattcaaccaattcatgaagagcgtaatcgtacggttacatttatcaagagaaaagcaggtcttttcaaaaaggctcacgaactagcagttctttgtcaagtagatgttgccgtgataatactgggatctaataacactttctacgagttttccagcgtagatgtggaggaaatgctaaggtactaccacagaacagacttggttcatgatgttaaggaaccgaaagattttggccattatgcaaaaaaacaaaaaattaatctttcggacaggaagaaaaagagaattagagatgatgacgtgggaggtcctcacgatccggacaagagaattaaaatggaagtgcaatcacgtgcaccacagccctcaccgtcggaaacgactccatcgccagcgtttaacaatcctttacaacagcacgtacaacgacaatttcaatcgttatacactgcgcagacaaatccggagaaggaagaaccaccgcagagacccgtattgcgcgtacagattccgaacaacaacacctcctacggcaatgtaataagaagcgaatcttctacgcctacttctcaacacaatggtactagcgcaaaccctgcccttgtaagccgcacgacgagttctgtacgatatgagggaagccctccgggagaacaagcgactgtggtatcctcctcttcctcatcgcaaccacaaccgccacatcaacagcaagaatcacaaaatcctcaacagccgtctcagccacaaccagcacatagatccctgctgcagcagcaacaacagcatgagaataagggaagattgtttagcggctacgagttgccgccggtttttaccggttcacccgcatttccgccctatctggccacacctttacagggaatacctagtggggatgcaggcggaaccatgggaggcaatggcagtgttcaggccggaaggttaagacccgcgatgatgtcagcggcaggtaatggaggcactgttacaccagcgggcacagtaccgccaataccaggtggaacagtttctaatacaggtgctggaactacttttagtagcagtagtagcagtggtggtggtggtggtggtgttggtaataatagaatgggcctgacggcttccggagttaatattggtggtggtgggccaacagagtatgcacacgatctgatggtaccatcgcctgcaatttcatcaatgtttccggattggcgtacgaatccaccaagtgcagcaacgggacacctcggtcaatctcaaagtgaagctccttctgctaattataacggtagtacgggcttaacaccttacattatggttaacaatacgcctcttgggaaccgatttttcaatttcgacaaggctaatgagcgaagagatcgatgaacgctcttcacgaaattttagaaatatgaatactaatgagtacagtaaaagcccaaatttgtagtttataatcgaacagtgactcacgtctatgtacgtatatatcattaatccataatcatatactggtactaaacaactataccagataactgtttaaccaatcatgcttagggcctccgcttattcgttccaagagtcctgagaagagatttcgattctgtggacaccctctttaggtccagttggtgccaattttggaatttcaaccttcaagatgccgctagagtaatcggccttaatcttgtcagcgtcaacaccggggtattttggcagtggaagcacacgtctgaagctaccggatgcaacttcctgcatcctgaccttgtcacggttttcctcagtaaacacaggtggcacttcaccggagatctcaatttgattagaatctctgtggtaatcaacgttgatgttactcttgcttctaataccagggacggtaacattcaactcatagttggtatcgtgttctaatagatccactggcggtgtaataccaacgttaccgaagtccccaaaatcagaacttggcagcaacccccagtcttcgtcttcatcgccgaaccatgggtcccagtcggtcttcgtcaaggctccaaagttgttgttactgttattacctctcctttgaagttcgcgtccctgaggtctgttgttagatctattaccatatcctctgttaccatacctattgttagatggcaatccacgtctgggtctgtaatcgttgtaattgtagttacctagcgctctgttgaaattgtcaacttcattgttgattgcgtcaaaaaaactaaagaatggtgtgttgaatgacatagcgatctcagtcaaataaacctagcgtgtctatatatacttggtcaattctctgacgatctgaaccatcgaatattggatgaccatctctgtcgaccagcgtatttatatccttggcatcccatgcactgcagatcccattcaatacgacttaccctttaaacggcgttgcaaaccgccccagagaaaattcaacgcttttcatgaaaattccaagaaagacatacatgataaggggaaccatgtttcccaatacagggagaaaggcaggaagatccttacacagtcggggatgtgctttaccaccacttggtattgtagggaatgtactcgaaacttcctgttgtgttcacttcctcccttgtataaggagttgatgcatcattagaacgactttctatagctgtgacgttacaacgagatggaaaacaggggaggagaatgtcttgggatttgccaaaatgttcgggagataagatgggattcgatcacacgcctctgcaaattgctcctgaatatgggtgaaattaaaatgcctccaccaccagaaaagggaaagaagttagtggattgcttcctggcaataaggtgtctctaggtgaaatcagaagcacctagaattaagtctagagtcaaatcatataaacttgcccagagaacttcactgtcttctacatctcaaagtagatcaagagacaatttggccgagtggttaaggcgaaagattagaaatcttttgggctctgcccgcgcaggttcgaatcctgcagttgtcgcgattaatttttttgatcttagatcacatatctatgccaaacatgattaatctctcgaatctcttacagcgaacggccttttctcgtggatttggcccagtatattatgtaaactaaggataaactaataaatttggtactactgacaaaactacccatgtacctctgtgctctgctgaaaagtatcttgcagaaagactatcagtcttaaatcactagagggcctaaaccagtatcatcacgataaattgcttgggcagcccaattcctttgatactgataaaaattcgaagattaaatacaaagggttggaagaatttgttttttataccgcggttcaaattttggtacaaatggaaggggatcatttttcctgatatagaccttggctatatgtatcaagtgctctttgtctacttccctttagatcaacaatggcctctggataacttttggccttttggactaaactatgaacattgtgagcatcttttaattcaggaacccacctcttgatgaattcaccatcggggtcaaatgcttgactttgtcgctccatattaaatactctgaaatatggttgtgcatccactcctgtactggatagaaagccccagcctcctacattcgaggcaagatcacagtcaattagtcgattgcggaaccaacgctctccccatctccagtctatcaaaagattcttgctaagaaaagaggcagtgatcatccttgctctattattgatgtagccttctagaagcaatttgcgcataatagcatcaataacgggaacacctgttttaccgtaacaccatttttcaaaatttggttcttcattgatccatttcatgttttctgaagctaaattgaatggaagatccattgacaaataaggccaaaaactcatagtgtgcttgtaaaaatctctccatgcgacttctctgatgaattcttccatcgggatcatatctttgggacttttacccaccaatttatcacctggtacaagatggaatgcttcgttgaccacagttctagcacttataactcccacagaaaggtacgcactcatgtgagaagaagattcatggatgagaatgtctttttccggatacttgtcgataccatcttctaaatatttcctcagcctagaaattgcagcttcttcagaagcttcagcgacattgccttgagcggtgaattcggcgggtaattggaaatcaagatcaggcagaaaggccttttcgttgtattgaatttttttcacctgcgaagttgctactaagctatcattaggctttttatccatcagatgtgcacaccattttttgtaccagggggagaaaaccgaatattgaatattttgttgagttttaaagatgcaaggttctacaatgcaagtatcatggaaaacgttaaattgaaacctttcatcagtagtaccaaatatcttaatgtctctgtacaactcatctgtcgggtactctgcattagcggtaaggaaaagaggtttgcctttggataatcgaaggcattggtctttgaaccagtgggcaaaagtcgtagaattagaaagtgtaggttcctcaggattgaattcaatgacgtatagggggatcgataattctaataaagccttgtgtagcgatttaagtgcattgtacaagaaggtgagtctaaaattgctgtcaagatgggctatccagtcgtgtttattgatggtaaatacagaaaccaattgggatttatcggtttgttgtttttcaatggctttgcataaagcagtattgtcagagatccttaaatcttctctaaaccaatgtatgaccgttttagcctcaacatcggccttttgacttttcatcaaatcctgtaataaatcaaagggtttcctccttttaccgtcatcaaatttttgtgcttcttgctcagtaattgggttgcggtagtaggtggaatccggtgaaatgtacctgcgtgaatcatagaactgttttttattctgagactgttcttcaccagaataatctctctttcccatcttgaaaatcaatcgtcttgttacagtatgagaaactgacttgagaaatgttacgttgcttaatttcaccatcttttatgtctaaaaagctgacgatggtaattctattagccccttgctctgcggaaagttatatcattacgtcagaggaggaataaaaggtacttggttttttttaccctcgcaatcgataggattgattacgaatccaagatgataattccagactactgtacaatgccttagcaattttaatgttattttttggaaatatgattgtcatttattaactctcgatcagtccgactgtctgtctaccttcgatatttatttttttttttttgtttttgcttcagccgttcctctattgaaaactccggaaatgctaattaactaaataatcacatatataatcgagaggaaaaactatgaaagcctcatcttaagaggctctaccaatgactgatacctactagtaccccgaacagttttagattgcgaaatatgatagcataaaattaacgtggatggcatggattcaaagaactgatgaatttcagaaatcactgaccgctgaacgattggcatcaaacaaaagtaaatgaaaacgaaactacttagactaggcgaacacaccccaatcgccttctgtccaaatcattttggctttgaaatgcttaactttccacacctctttgtccttgacaacgtcaacaaagtaaagggctccactcaagagacgagtggtatcaggtttgtttccttcccccggacggtagtgttgtgccattgctgacgccgtaacagatgcagttccatttgctaggccttccaaattcacgcgaatattacttaagtgatgagtagtatccagtttggagactttatcgaaacttccggcctgtatttccggtaatcccttcatcacatttcccatcaagtcaaaggtagcatccggtataagtgcagattcaaataacgtaacgtcggcagtgtccaagcctaatacacagcggtaaagggcgtcctcgatggcttcgcggtcgttgagatatgataaggttgtagggaaagacattgtatctataatgcacttggtgaggtggaatttcgaatgaaaatgggataggactagctgcagaagctgcattctactctgccactatatatgataatttagtgagttagagcaactccgtctaagaagcgatgaggcaacaacagaacggaaataacaaggttatgcctgtgcttatcaacggatgtgttcgccatccaatggaaatgataccgtaacgattactttgtagtgcaaataaatcaaactgaggaataagttaaagatacgcataactaggaatcccattgtgcacacgctaatagagacacttgttcttagaacaaatcctaataccacttactgtgtgttgtagctagattaattgccaagtgaactggtaattggatacaacagaaacggtaacagagaatcatttatcggaatatataccgcggaatttctcgaggtattatcatagaacggcgattcaagttcaacatagcaggataagtacattcaatatggcttatcaataatggttcatagaatatctcttggtaccgaggactggattagacctgctaactgatgtgcaccggtagacttgaacatcgattcgtttcataaacaagtgaaagtggaacggatgaatattataagacagtcaacatggaaaatgaaactcctttatagaattacagtagggttttttgccaatgcgtctttgtgagccctttggtagggaaagtatttatcatatgtttcgatatacacaatgggacaatagctgataccatattgaaaatttactcattcgcaataaggatgcaatagcaaaagcgactcaaggaaccgcgactcatgaataagtaaatatcggagaatttggaacagtcttaagcgtatttacaatacacgccggtatgaatagaaaggtaagtgaatgtacgtgtgatatccattaaaccggaactacaaatcaaccggaagagagaaatgcttcgataacagcttcgaaaacagatagtattgtggtgagtaggggacatctaacaattctatcttgtccttcaaacttctattgataattgctcctggctcaaaaatccgtacatcacccggcaaggagaaaggaaacttctaaatatgcaaagaatattcgttggtgcctgctgtgccttctaccccacaaagatcgccttgaagggtacctaaaaaaataagtccgattgtgccaaactacagaaatagaaactatgtggagcaaggatcaaagttgtgtttttgctaaggtataaatgttcgcaggggagcaaggataaagttatctattgggagtgaagcaatgtaacataagttgacattctttcaaatgacagttcttgttactggtgctgccgggttcattgctaaacatgttattcatgaccttttgagagaagattataaagtgctaggaacagttagatccgaaactgaaggggctcttcttctacgacagtttgataattctaatttatgctttgaagtggttccagaaatcgcagaccctgaagtggtagaagaattatttgtaaaacatggggaagatattgatgttataatacaccttgcatccccgtctatacattgcagttatgattacgaaacgacaatgatgaaaccaataattgaagggaccaaaaatatattgaatagttgctctaaatataaagttcaaagggtagttatcgcttcttctgcgatgagcatgatagacttctgtacaatatacgatgatgggttagttttcactgaagaggactggaacccagttactagaaataattatggtaacattcctacagtagcctatgcgactgcgaaaaaatttgctgagttagaagcttggaaatttgttaagaataacaaagtaagctttgaattatctattgtgtgccccacttatgtgtttggaccacggctgttcgatggagacgttgatgatcttttaaacttggcaaacaaaccaattgatgatataattcattcggttgcaggggacccgttagaaccatatttacattctgaattcgttgatgttcgtgatgtcgccagagctcatatattagcattccaacgagatgccgctaagggtaagaggttggccgtaagtgcaggtaaatttaactctcaagaaattgttgacattttaaattatactttcccacagttgaaaggtaacattactcaaggattgaaatcaggcgtagccgatgaaaccctaggagcatgcataggtactgtgaaaacaaatgaaattttaggtattaactacagaactttggaagagaccacttatgatttaacaaaacagatcttgagagtagagggaaaactggagtaggatttaatactccttttaggtagtattatgtaggtgtaaaatattattgacctttgaggtatgtagaacaggagctatctaaaaacagtagtcttagtatacatgattaccgtgaaacattttcagatcaagcaatttcttaattgcactactttttggtttaatgttaaaagcattcttcctaccttgaataggcttagaaatatgccattatattaatccacagaatttatcagtcttaccaacgatgcccttgagttccataaaaacaactttctttgaacctgaagctagaggctcgaattcagttttgtagaaatttaaacattccttttccgtaagagaagttctcttgcggtctcttccacattccttcactgtgcaagtactggttcatgtattgagcaacttggtcccattttttcaagtttctacctggtacgaagtacattataattgctagggatttcgctctctggtaacatccaacaaaccgtatttcaacttgtattggcccttataggtgaagtgcatgattaaaatgggataaataaccgagagagccttcataacgtagtttttgtttttgcagaatatactgagaaagacaaaggacaaagaacatgtaagtgaagaaccctttatagaatctttttcaatgatcatcgccaagtaagagcacaagtgagggctccttctgtagaaaatatttagagaaaatatactgcctgtcgatagcatttagtggcttcatgaactacaccaggagcatgtcatcacaacgtgtttccttaaggcagcctgacactcctgccctcgaaaaagaactgaaaagttccccaataaccttgttcgcaaagagctttgttcatcttgcatgccaattcgtcccattttgtaccgtcgatgccagcatctactgctaggaaaagggaactaaacagatccctagtactatacagcacactgcttctcttacaaaaaaaccagattgactggaaatgaagcgagacagccacagatttcatagggaagatagaataggccacgaagaaatcagagagatgttctgaaaagttgattagaacaatcaagctaataatccccaaaagtgttgcaaacactggaatgaagtgatggaagacctgttgagaggcacatgtaaaccgatttccgaatatgtgtattggcgaggtatattcttcagcttcttatgagccagttttccattttcaacttggctgatgtgaagttaagttgaaatgggagggattcgatgggggtagtacgtttcagcccttgatgaattatcacgagatacgtaacgcgttactcttatcttatcttatcttatcttatccgatgacagaaggaagcggtttctatgcattcagatagtgttccatgagaagcatttaatccagaagtagagcaatagcgtagattttacaattataacaattgacatggaagtaagaggtaccgttaacaacgggtaaaacaacggcaccccagaaatatggaaatttttacgctgctttacaagtgttagaaggagtggcttgacaaattcaaattagcatatttaagataaaagacaaaaactcgaataatttttgttaatttctcttgaagcgctgttggcaacagaggtcctcgataaagaaatcccccctcctcaagtttcgtgataccgcaaaacacttaggtataggattctctgatttggtttcaattatgattttgctgtgaccatttttacgtattaaattttctccaagatttgattgtgaatgtccaaaagtacgaagattgcattttggtttttggagccactaattcattatccaccagtaaaagacaagtgttcaactcgtgttaactgtactcctaattgctgcgaaaaattaaatctacacaatacgctttcgttcctgtcaacctctcatgtgcgtcttcgaactttacatagttcaaaagaacgctcaaattggaagcatctgcttcaatcgtatcagccaacccaggttcttaaagttcgtattggccccaagttttaccctgattcaaagaaaagaagattttggttgtacagaaaccattaaagccctcttgctgttgaggtacagcgacaattatatttccagcattcgcaaagatagcagaaagaaaacagagaagaagtgcattgtatgagtagtgttctggagagggttaaattcgatgctcagttgtgcttcacaagggcccacttttatatcaaatggaacaaccacttttaattcaaaagccctgaatcttctgaaagtgtttaagtctttgaagatctgcatgtataacgtatgataccatttgctcctaacatggaagtgatgtaaatgaaaacaggggaggtttggcggcaaattggatagtaggaatatcaaaatacaccctttgcaattttgcaagcttatgaaatttagattgcttctctattggaatgctataatagtagttccctgaaacctggattttacttcttaaagttatcttggaagcgtactacaaattctctgatgaaagtttgatgagaaagttcctctgaagaaacaatttttctaagttccagggtcataaaaatccatgagagttgcgaaggttagtagaaaatacctttttcatgaaggaggaaacaagaaacgattccattgatattggccagtaagtaggggccttttaacactccaaaaataacggtacatcttcatcatggaaaaaatcaataattggttcagtgagtaaaatttgaaaatcattttgcattgattgctgaaattcatctttgtttagtatcgcttcgatagcagacctagtggataatataaaggagtcgcttaaaacaaacaaatacgactgtcttagccgtaaaaatagctcttcggaagaggtatcaatgaaattttggtgaatcgcatcgaggaacccgacagcagtgagtgcatctactcttagttctggaacacttttttcataatagagtatgtgttttaggaaatcttggaggcccactctgaacaagccaacctttgtggtagatgaatcgtcgttgtcagataacgccagcttcgaaagaacagaaaaaagttcgtacgttaacctcggcatgatacagtggtataagcaaagagcaagagaaaatgacactgaatagtcatgttcgcgtgtatgcgtaaggtccttgtaaatttcaaatgttgaattgagattgtccaaaatcagttttagagatattaattggcaatacaatgtattttgttggaggcagaaagagtctttttccaacagatttccctctataattgagaaattcgatatcatctgcaaaacaagtagcataacgaatagtttttcaaatgagatgtgttttgcatgactattctctacgtatgatgcaaaagtaccaaaacgtgcagtgaaaaaagacttcagttccaatatcaaactctctaagtttggcgtagagtgcggagagtagatctgccgcattattctcctaaaaaataagaccgagtctttgaagacgtgaaaagtccccaattcgaccttgcgctgatattcaaattcctggccaatgtgtaggggagaaccgactgcaaaagaggcctcaaagtcagcatacaaaatccaagcccacaaattgtacagataaatcgaattatctctaaaatgacagtgtgtttcctccttgaaaagcccaatgtgaacagcagtagagaatgctaacatgactaaggaagtacaagtcccgccatcaccgacagtaaatcccgtaatgttagaacacatgtaacgcaacataaaaaattgcactcgttccaggtaggatgccttactcaaaacaaatgaggtgatggagttgtgaaaaaatcgtaattgaagtggtaccttgtttttgtaatacaccaaacataaaatttgcgttattatccctaccctgtaataattcttcttgtcacccaaatcgaaggatgtaatccgagaacctgttgaaacattttcatcgtgtatgaggcaagaatgaacatcagagaggaccttggaagggtccattatcgcaaaggaagaaaagagattactgttaaagaagacatgcatgcattccgtcaccttttcgaaattgggcaagacagcacatagaccttccaagattgaacctgctgttacaaagcttaaaggagtatctatcgagttcgattcaatttctaaaagaaaatgattctcttgtttccagcgattccttgtggttttaatcttttcccagagttgagcaaaatgcggttttagagacgggcttctgactgcaaatctaaatgaagtggcgccataacatataactcgcccatgttttgaggagatgtatttcaaatctgtcaagagatttctcttcgaggaagacttttccttttcttccagtttcgcttttagtatctcgatggtagcgattagctcaggttttttcagcgattcccagtaattcttttgggggtggccaatttttacattgtatatgcagttgtatcctctttctgagcatgcagtgcaagctggcactttccgatcacatctaacctttttcctttgacagtttgtgcacgtttttgatggtttattccttctctgcatccctagtttctgtaaaccattgcagatgttagtgcacctatctattttgattaaaccctgagtaacaacagatttcaatgctacttcgcaaggaaccagtctgtctcgctcgcatgagtctttacagattccagatgttcggagttcgataactttatgttattcccgaactttttcatatttccggaacaagtcaacatgtacgaattatagagttgaaaagagatcctctggaaatctagcttagggagagacgagcaggacgaacctgaatgttagctccggttgggtgataacgccgggaaacatcaaaatgcacctgttgtttgcattaataaagaattcttaatcgaagtataaattccaagacctatcagaataatgttagtcttttcgcccttgagtgaaatgagaactatctgaaatgtactttgaaacctacaaaaatacttttgcagttgatgcattggagtactttggtttgataaaattccaagaatatgcagataggtcaagttcaacgagttggctcgaacaaggtgattcggagagagattcaaaggaatgtgctttagttaatgggttggcaaaaagcgaggatgtcgatccgtttctggtcgaattcaacggtccgactgaccccgagcatccacataactggtctactattaagcgatttgtcgttgtctttaatgtgatggtacttacgtgcgtcacgtatatggggacttcgttttacacgccaggacaagatttaattgaaaaagagttccatgtgggacatgtagtaggcacacttaatctttctttgtatattttgggatttggacttgggccgctggtttttggaccactttctgaattcgttgcatttgggcgtcaaaggcttttcattgtaacgctgtttctgtttgctatgctacagataggatgcgctctggtgaagaatattgcaggactagtgatccttagattcctttctggaatattttgttctccatcattagccaatggagctgctgccgttggagatgttgtcagaccgagacacattcctgtagtacttggtttgtgggcgataggggcattagcgggaccatctacagggcctttacttggtgcgtctatggttgttgcgaaaaattggagatatatgttttggttgttgatgtggataagctcagcgacacttcttttaatggttttctcttatcctgaaactaacgaagatagtattttgtaccgcaggtgccaaaggataaggaaactcacgggtgataataggtattatacggtcaagtcgagggaagaagagaaattaaactggaaggatatcggcataactactctgtacagaccctttgagatgattattaaggaaccgattgtgatagcattgaacgtgtaccatgcagtcgagtatggtgtattttatttgttttttgaagcctttcccatagtatttggtgatgtataccatttcacgagggttgagttgggtgtgtcctacatgggattttgtgttggttgtattacagcttacggtgttgcaatggttttctcctgttggtatgctgctaaaaaaatgtccaataatacgtttacgccggaaacacatttggtgttaatgatttgggtgtgttggacccttcctctttcactttttctatttggttgggcagcttcagttcattggattataccgatgatttcagaggtaatattcattattggtcagttcaatattttccaatctgtcttttcctacatggcgatctcttatcccaagtacatggcttcggcgtttgctggaaataatttatgtcgatcgggatttgcatgtgcattccctctctttgggaaggctatgtataataatttggccattgatgggtatcctgtgggttggggatcgtcaattgttggtttttgttgtctcgcgctttcggtagtgccgtttgtattatatagatatggtgcatacttgcggagtaaatcaaagtttgctggataagtgtgcgctgttattcaagtggattattttgctgaatggacgatataggtggacctggttttattattgtgtctcaccctagattggtattattggtattagcagacacatttgacggtacggctttcaagagggcacgaaatgatccagttagggttcactaatcaccatcggcgtatatgatgatattaggatggacacccacggtcttcatttattgtccaaaaatggtttaagggatcagaaagctactagttcatgcacagaacacaacatcagcaggaatacaacttgagcagagatatgtcattacctatcattagagttcatttcttgaataagtcaagggcttttagagtgttgtggctactagaccagttgaaactagattacgaaatagtaccctacaggagggacgcaggttttcgtgctcccgaggaattgaagaagcaccatcctttgggtagatcgccattgcttgaattggaagatagacagaccggtaaaaagaaaattctggccgagtcagggtacatcttccagtatgtcttgaagcactttgacaagactaaatccttggataacgaagacatcgataagtctgaagagatccagtattatttgcactacgttgagggctctcttcaacctcctctgctaattgaactgctgctttccatagtgaaaaatgcatcggttccttttccattttcttatttttccagaaaggtggctgaaaagattggagagaagtactctgcaggtgagttaaaaagccaactaaactttattgaaggccagattgctaagaatgatggctatttggtcggtggcaagttgagtgccgctgatatcttgatgtctttcccactagactcggcctttaaccgtcagtttgctgatcccaagcagtatccggccattgagaaatggctgaagaatctcaagacttttgagtcttataaggtttcgaagagcaaagctgaggccaacggtgaggagttttaataaattttagctgaagtagaggggcagataggttacacagaaaatttgttagttcttccaccgcctaaattagttagatatggctgtcgaagttttttttgttgtaactctttctatttgatatgccaaaaatgcgcctgagacatacttgatatttttaatctggcaacgttggaaactttctcttttgtctattctatttggatattaataaagtttgaagactttgatatgttgtataattaaaatgctaattatgataatatgtatttagttgtgggcggcaaaggtttaattcgatgcgaaatgctttggtggctggaataaaaaatttttattatagagaagggggatggtgtggtcagaacgactgcttggttctatcttacactttttgagagaagtaagcaggatgcgcaaaacttctctagaatttgtgttaaaagaggaggtatgaaacaagtggactgaaaaaattacttgtgagattttaattttccaaggtcacaataagttaatgtgctgcaagggattgttttagttcaacaaagcccgtttcgatgttctgttaaaattacaaattggttacaaaacggaatttgccgctgtgttaaccatggagcagcccgggaaagtgaacatgaacgaacagagtgaataagttctgactgtgtagttataggataattaaacgcaggcaagtctcgtcaggaattggttataccactttacttcgacattgactgtgggatttatcggccattttatcagaatcctggttagtcacggtgaacgagttgatttgatatactccaacatcgaaaacagggaaccttatttcaaacgtcaatcagttagcagcgcatggaaaaaagaagtacatgtagaatagatatacatacgtagaagttgaaaaaccttatgattaatcaaaggaaggaattctggtctacaaggcatattgttgagttatactgaaattgtaggtgtgcaatttttatgatttttatgatttgtatcatgcattcacaattagaatcccacactgcgacctcaggcccctaacttgcatataagtgcaacagtaacgaggatacccagctagttttactatgtacatccaaagggtgcgatattaaatgtactgtatgagacagtcctacgctttcagaccgaatgatgacggctgtaatcgtcggcttattagcggctgattcatacttgcaccataaataacaacaagcagaatacacatggcgctcacgcaacttactctattttcaaaaagaaaaatatctcgaagtaaaaggattggtatcctattttgctcctcccgtccatgtcctgagaagtgatagattagtctgagtttggtcaaccctccgtaagctacttacctgacctagactgtttatggacaaattaataaaggggtaaatcttaagctaccgtcactgggcaatacctaactctggtccaaatcacaatggcactatagaacactgagctcaaccccctgccatttaaatttggagggaagggtcattcctgtaatagatatgatcggatctaacgatttcaagggcagtcaagtacaattgatgaaaaggacacaaaagacaattcaaagatcaatatgctctgacatggatcactttccaaataaagaatcgattactgaacagtcaaagagttcccatctttctctttgctaatggtgtactctataggtattcttcgacatgtgtttctcctgttcgatagagtcaaagtgttgtatacgcagggccttaatactcccacctctgcttgcttggaatattccataccaatacttctggagcgaaaattattaaccgccaataatagggctgcgaatgttcctgtactttgattactgcgagttccccacgcgggcggttctccgaagaaaggtttatcgaggacagacaacttcttgaagtgatatattcagtaacaaactttactaatcaggttactttttcgtttacggcattgtctttgattctatgcattttcgctttcgaaatgtctggtgcttctagcgttgctgcatagaaacaaaaacaagccccgcgaatcctatatggatttcaagttaaagataaaacaaagcgaatgacaaacagaaatgttatgcactatagtaagtgatggaatatgttaggttcccccttctcacagtgatgtccaggagaaatacttttctattttttgcggggtcaatttaattattgatcacaacttctctttaaattggcaccataatgctgtggtggagaaagcctttcgattcgatataaaaggtgccaaagaatggctggtagatctgaaaaatgttggttgcatttagagcagcataatattcttttcaaccaaacaagaacaatagcttacttttgaaaaatgcttacctgtctgcttttatgtatgttaggggttgttctagcagcctctgatagcacctacgagcttcattttccctcatacagtggtcattcaaattctgcttcaaagtacaaccgccgtacatcatcaaccgtgtctggggttacaaatatgtgcccaggtttaaactttcattggcattcaagtaatgaaaatataatgccctactcaatggatttattatcagtcgattgggttggtggtaatacctatgaacttaccatcaatgtcaaaggtgaggaacacatcgatttgaaatacctctggtctttgaaaatcattggtattagcggtccacaaagtaccaaacagctttatggtaagaatgagaatacatacttaattgatgacccaactgattttacaacccaaattcaagtatatggtcaaacatacaatggggacgattgtaaagttgttatgccatcattccaaattcagtatgaatatcttcaaggtgatgctgcccagtactggaaaacttggaaatggggtaaaactgattttgatctaatgactggttgtgacgcggacaacaacggtaattcaaatgcggacttcccactatggtactgggataactcaaaagctaagtgcagttcgcaaacaaatacttctgactcttcaggctccagaccttcggtaccatccagctctttgccttcagcgccatccggttcttggtcttcagcaccacccagccctttgccttcagcgccatctggttcttggtcttcagcactatccagctctttgccttcagcgccatccggttcttggtcttcagcaccacccagccctttgccttcagcgccatctggttcttggtcttcagcaccacccagccctttgccttcagcgccatccggttcttggtcttcagcaccacccagctctttgccttcagcgccatctggttcttggtcttcagcaccacccagccctttgccttcagcgccatccggttcttggtcttcagcaccacccagccctttgccttcagcgccatccggttcttggtcttcagcaccacccagccctttgccttcagcgccatccggttcttggtcttcagcaccacccagctctttaccttcagcgccattcagtcctaaaaccattgtgccatctggttcttggtcttcagcaccacccagccctttgccttcagcgccatctggttcttggtcttcagcaccacccagccctttgccttcagcgccatctggttcttggtcttcagcaccacccagccctttgccttcagcgccatccggttcttggtcttcagcaccacccagctctttgccttcagcgccatccggttcttggtcttctgcaccacccagctctttaccttcagcgccacccagctctttaccttcagcgccattcagtcctaaaaccattgtgccatccggttcttggtcatcagcaccatccagctctttgccttcagcgtcattcagttctaaagccattgtgtcatccggttcttggtcttcagcaccatccagctcttcgccttcagcgccatccagttctaaaccatttgtgtcatcctgttctcggtcttcagcgccacccagctctaaacctttagtgtcatccggttcttggtctttagcaccacccagttctttgccctcaacgccattcagttctaaaccttttgtgccatcaggctccagttgcagcattgtaagcggtgtttcttcagtgtcatctcattgcagcactctcagcagtggttcttcggtgtcatccgggtctgcttcttctatactattgagctgcaacagtctaagccatggctctgcatctttaataccttcaagctctagaagctcggcatcatcaaattttggcattgtgaattctacatcttcgttattattaaattcctcacccttctctccaatgaaccctgcaacttcggtaccatttaattcaagaatgagatctccgtcttcggcttctagtttattgattaagacaaaacctctgctagaatatgaatctgatatcgaaggctcaaagttgtcgataccaccaatctcttccgctgctgatacgattattcctgggacacatgctgcgacatttatcacttcgacagttgtaactgctgcgtcgtaccgaacaactactcttttggctccggagaccgacatattccctgttcaatccttgagttctatagcctgtaccactcggattccaagttcgttcggtccaagctactcgaatatttcttcgaatccgaaaaacgaatctggctcctgtatcccatgtacggctttgcctatgatttcgagttcctctataccccatacagccttatccggcaacagcaacgtatctcgagtgctgttgggcattgactcgagttcctgctctacgagaactatgatgacagtggtgaatacttgtacaaaaaattatgattcttcccagtgttacacaacagcacttatcgccgattcggcctcagcacacactttaacttttaaccatcctggttttaatcaattctcagatggtgctgcctttaatgtgtcctctgaactagcaacttcgattgttcaacccacctcctacaccaccacaactaaaaccagtagttgcagttctgctacatcatataatgatggagcatcaaggagtacatctaagaggtcatttatattcgagccttgttcaggtcaaggtgttctgtagccttccatatacactacagatgaacttggatcacctgccataacagagactgaaaaatctgagacaaaagtatatgttacttctagtggtgacgccagggcaaacaggtgttttaacaaccggtcaacagttttcaagtcagtcgactattaaaggtcaaggatgccgaagaatgagaaatgctgctaccaggagagcaatcaatcagatatctgtttcgactgtcagtgcttcagtaagctagtcctccaagctccatttgtctctcaccatgtcctttcttatcagtttatgagggctctgccacccgtgcgaagtcatcatttacagttttttgttaaacctctcctggtccttgtaatacctttaatttcattttccttttatgatatttgaagttccttttatcaccgttcttgtgatttttcagtttcattcgtcaattcaatttggattcattggggaagaattcttaattcagtatgatgagcatgaacttgtctcaaaccttggttacctgctacatgattttcgtagtgatttacctgagaattgagaaatccagtaacagatgtatttaattgaccagggccatattgcaattatttaggtgtggcgttaaatttatacctagttttaacccgatccgtctattcttcccgctgggatttggcgaggatttcagcgccgtaacagaatgcataacgagagagtattgctaataaggaaagtgcaattgcgtttaaaccctgtataaggaatgtttagccgctcatggatcagaagtaagaggaggcgatcttggaggataacgacaaagaaatagttccatcagtactctttgggaatagctttattcttcagggcaaatctctcagcgtcctcgagacgtaacattcggtactttgatgtggtttgtgtaaaaccatcaagctttctgctgtggtcttactgattatccggtggaattgacatttgccttgaacaagtgagtaagataacgacagcgcgttggtggtcttttaaataatacaacttgtatatatttgaattgtgtcagatgaaagaagcgaaattcctggacctttacagctgttctaattagctgtttttgggagagctgcgctaagcctattagatagcctaggatgttaagcggataaatgtcaattcgctgtttttctttttcatgttttgtagagcgaagatgacattcagtaggattagtttggctaaatattgaaactgaggtgagcatgtgctagtatgcaagagagggacgctttgacaaaggatgtttctgtacttcctttttccttgacctctagcagccacatgtctatgtggagagttttacaaagaaaaaagattttcaaaaaggtactggacacaaccggattcgaaccgatgaccttctccttgcaagggagacgcgctaccaactgcgccatgtgcccataaaatagttaaagacttagggataaatgtaatcccaacctattaggttactaaattacatcatctcccccacatataactcttgccaggatcttcgctataatatgtattaattctttgtctccagaatacaacctccagtcaattcacctcactcccacaaggttctctcatgacataccaaccagtgacttgagagacttcggtgttccatttttgcagtgaacggtcccagaataaacctcttgattcgtttttttttttcataatttttgaaattgtacaactttcaagattttttttttggtactacagctttctcacaaaaaacccaatatcagattcactatcccaaatcaaagatatgattcaatgtgtttgatattgtttttttcccaaacaacgacttgtaaacgacttttcgccttgaaatggtcttacagataaagaaacaccattattccttctaaacaataccggataattgtaagttggtacaatttttactaatttcttagattcaataagcttgcatgaaagaggcacttcaaaaaaggaaactaaaacgattcccatcatttaggtaatggattgttcttacgtcatactctccactttggtatttttcggcggcagaggcctaggtccttcttgatcaatctgcttttccgtactagtgatgttcttcaatagagatctccggcagcgttctctttctgatctgcactatctgcactaccggaagaaaccaagaaaaatcaatgagacaggggtaaactaaccggtcttgaaacgtcttgtcatacaatgtggttttgctggagaaagtatcctaatattaagtaaacaagatcgtatgacatttatttcacgcgatagtggtgcttctttggaggtggcttttgaatttcccgtatatgcagcatttttggatttcggtaacattttcgtcgctataccggagccttcctctccaaagggcttcgacaatgagaaagttcttttactctttagatcaggaaaataattggagggaacattacctcgatgtacctgcacaggcgttcaatctcatacttgatggctggggtttaaacgctatgataggccttgttaaacaaaaatacgagcagtccactgaatataccttttatgcagtagacttttggaaaccttcaatggaaaatgcctgtaccgacggagattaggaaacatggtatttgtctgatcgtgtattgatggtgtcaagtacagctttaacagaaggaaagcggatgctcactgtttgatgaagaaaacatttgaagatcttacactaaatgaggagggttgtgagtcaaaaaaacatccagggtagtatctagagtttcctaagaaatccttttcaccaaaatttcaattcttatgcctcgtgtgaccgctaacaagggttctgcaggaacgagtacgacaccaggaagacgaggtcaggaacacaagcaagtgtctcagaatcattaaggaatggcttgcaagaggaagatctaaccagtattaatccgatgacaaaaaagcgggattatttggcataacttcgaacaccaacactaataacagtaaagtgaacaataaaccaaccacaacaaatcaaaataaacttgaaccactacggagagatttaatactcctaaggaccaccagttgtagtacttgtggcgatagcatatttcgaaataatatatcctgttattttcagtttgagaataaggagtataaagctccaatcaatttgtttctccgtttacatttacttgtgtaattgtaagaatttctttcagctcgctgtaaactaaagaacttttgccaaccgaaagcagctcaaatcgagtcctgtaacattttaaacaatgcttaccatcgaaaaatataccctcagaatgacagctaatttttttcttagtaaaacattcattcatatacctggctatttggtcccatttaaccagattttttccagggctaattttttttattatcgtcaaaaatttgactgcttgccgtatacccatctctggatagaccaagagatagaaactccagtaatttttcaaagacacatactggaaatgtatgctaaatatcaggagccaaattgaatttgattcaaatgctattatgatcatgaacaaaaatagaccttgaaagtaacaaaccaaaagtcccttgtacaaaccggtttccgtaaaaggaaaccttgtttctgtgggtgagtcagggtagttcaggattcaatgaggattctggaaaactctctttcaatgataattcaaaatcctcttttattgattgcatataacaccttgttgattgagtcttgtctgtatcgttaataccatcaaatttctcttctagatatggagttaaaacattattcctgaacccaaattgagcatcatgaccattgaaaaaaaagtaaggtgtgtcccagatattttcttggtaaaaaagaaggttcaggcaacttgcaatcgcatcccatctctcgatatcaagtccgaattccaacacttgctgaaccaactctgtcgtattgagatgtgatttcgaatagcgaagcaatatatgggaaatttaaattgcaaagctcacgagataaatggaaatgatggagcccaaaaacgcattttgataaataaaattccacccagatactaccaatccaagcagggataagtatgagatcacccagcagaagcgatgcttggatctttcataaagggttcatgaaaatgcattggtgaagatgtccttcggtaagacaggtttttgagattctttctcgagtcctatgtttgtgcttgtttgagttttgtagttgcatgtagtgaatcctttcccgagctgctatgagaaacgagatcagatttttatcgtcatcggagcgacaaggcgaggcatattcttccaggaattttgatgttttcaatctaaggttcaaagatcttctatttgccaaatccgtgattcgaacctatgaccattttgaatcgataacctttaatcgcataaagttaatcaaactataagggaatcataattaaacacctttatgcgcaagccgtttaagaactgagatgactccatttttttttcttcttttcttttcagtgtaatttatcgtagatctattagtatataggtgtcaaataattatatattattcaattgttgttccggaatgtatttccattgaagaatacgccaaaagatactagccgttgatatgaataaatcatcatcacaagaagttgaaaaaaatgataatggagtagatatatcttccgctaaggatgatagcacttttactagtggtgatgatgatgctgatatcgcattaaagtttttgaaccataaagatgcaaaggactacgtcttggaagaggatgaaaaattgaatacagttgagaataatttttatggttcatcgacattgccccccaaattgcttagaaaaattgatgcttgtgttctaacattcttgtgcttcacctatctgttgatgttcttggataaggcattattaaactatgcagcatcgatgggcattaaaaaacatttaaaaggtaatgaattttccaatctgggtacgatattttccgcagcttacatctttatggagcccattgtcacctttttaattcaaaaatatccattatccaaagttatgggaattttcattacatgctgggggattgcacttgcatgccattctgcctgtaaatcatatacatctctaatgatcgttcgtactctattgggtatgtttgaatcttcaagtgtagtgggttgtattgcaatcagtggtatgtactataccaaatctgaacaatgtgctagaatcggcttttgggcaacacaagcgggaacaggttatatcgttggtggtctcatatcatttggattcttacattataacggtaaagatttcacctcatggcagatcatgtttttggttgtcgggctatttacagtgctctttggactggtaactttggtagttctacctgataatgtgaccaacgcctggttcctctcagaggaggagaaaatccttgtagttaagcacattagagataatcaaacaggattggagaataaaaaattcaagtggagtcacattaaggaattatttttacacgataaattgacttggcccatgttagctattactgcgtgttcacaaatgtcaacaggtgctattggaactttctctgtgacaatcactcaaacattcggatttgataaatatgctaccgcactattacaactgcccattggtgccattacagctataattatcataattactactcagatgatgtccagatggggtcaaattacgctggttaccacttccatgtacattcccactatcattggttgcatagtaatgatatcactcccattatcccataagatcggtaatcttttctccctatacctgctctatagtggatcttgtgttattaccaacatctacctttggaattctttgaatacttccggttattgtaaaagaatatttcgtaatgccgctacaatgattgtctatagtttggcatgcatcttggcgcctcaaactttcagacaggcttattaccccagatatatccctgctaagataacgctactagtgactcagtgcatttgtgtacctttacaattgtacgtcggttatgtgtgtctaacagaaaacaaaaagagagataaagagcaggaaggtaaaagcgtggataaatatgacttccgcgatttgactgacattcaaaatagaaattttagatacatctattgagtaatcctttggttttgtttatagaattgtatagaattgatagataaagttgaaaaatttatgcccaacttaagtaaccccatcgccttaacatataaagtactctttgaatcgacaggaaaagatctcaaaagaattaaattcaactatgaccatgctaatgatttggatgaagaccttaattacagcttcgatttagatccagaagatgaagaagtagctgtagaggatactggtacagagaaagataaagattcacaagaagatgaatcagaggaaaaacgtcatgatgatgataaaaagaaaaaagctggtgaaccttcagaacttgaaggtatttccttgtctaaaagacaaaagaggttataaaactttaggttgaaagacaagaaagaagaacaagtcaaataccggttggaaaaaagagaactataccaaaatctgctccagaggaagttgtcgagtacttagcttcgttgattcgtgaaaagggtcctgaaggaatccttttttttttccactgaaaaatcccaagaagatcgtaatcttaccatatacctaattttatgtcacattttccaaatcttccagaaccatatttttatccttgattaatttgcaagtcgctgatatctacagaagttcaggcgataatacagcttgtgtcaaattgttcgccaagagcaaattgaaagatgatttagctatagtggaagcgacgctcagcgctaaacataagagaaatgaacacagaatatatttcattgcgacaccaaaaagattggaaaattggatatcttgctagatgcaagttctatggaccccaaggcaaacaattcgctaaattgtggagtcattatagctcttttcaaacttctaaagacttctttgaaacttcttgtcgtacagtgtggcgttgctggagaaagtatcctaatattaagtaaacatgatcgtatgaaatttatttcacgagatgatggtgcttcttgggaggtagcttttgaatttcccgtctacgcagcatttttggatttcggtaacataatcgtcgctatacgcaagccttccttttcaaagaactcaccagtgaagcagttcttttactctttggatcagggaaatgattggagggaatattatctcggtgaacctacacatgcgttcgatctcgtacttgatggctggggtttaaaagctatgataggcctcggcaaaaaaaagacaggcaatccgctgaatataccttttacacaagagacttttcggaagtgtttgacggaagtacctgtaccaatagagattgggaaccatggtatttgtctgatggcaagtgttttaatggtgtcaggtacagctttaacatgaggaaagcggatgctcaatgtttgatggggaaaacatgtgaagatataacattaaatgaggagagttgtgatcagatcttcaacttgctatcggagaaattcttttcagttaaccacagaggtaaggttatacacaatttttctaagcaaacttgaaattctattttcccaactgttggctttacagattatctttagccaagaaaaagggtgcaatcttagttgagagtacccacccggagaaacttagtactcccaggcaccatcagtagcagtacgtgtaatgctaacatattttgagatactatccactgccgctctcaggttaagagtgaaaaatccgatttatttgtctctctttttactctacgcttggttttgtaaactccacaatttccttcaactctccatcaaccaagctgtttccaacggaaagaggctcaacgtgagccttgtaacagtctaaacaatgcttaccgtcgagaatatattcctagaatggccgctatttccctcagttaaatattgattcatatacctggatagttggtcccatttatatagttcttttccagcaccaactttcgttattatcgccaaaaaattgattgcttgcattgtagccatccgtggatacataaaaggatggaaacacctgtagtatatcaaagacatatactgggcatatacgatcgaaatcaagggcgaaaatgatttttgttttaaatgccactatgatcattaacaaattagcgcttgacaacaacaaaaaaagaatccaaagagtaaatattgtgggtaaaagaagagtttatttctgtgcgtgtctctgggtagtttggaatttaaaacgggttctggcaaattgttcttcaataatagttcaaacttctcatttagtgattgcaaataacaccttgctgattgaatcttgtccgcgtcagcaacaccttcaaattgcccttcgagatatggctttaaaacattatacttgaacacacgttgaacatgtcgaccattaaaaaaaaagtatggtgttctccagatgttttctcggtaaaagaaagggttcagtatattcgcaatttcgttccatttcctggtatcaacgccgggatttgattccaacacttgctgaactaacttttttgtattggggtgctctttcacgtactggaaccatgcagggatcagtccaaataaaagtccagagaggccaacagcaagtgcgatacccaaaggcagatttttatcagcaaaattccagcaaaattctaccaatacaattaccaagtatacatatgaaaccaccctggggaagcgatgtttggagatttcataaaacatccatgtgaatgcatttttgaagatgtccttgggtaaggcaggcttttgagattctttatcagattccatgtttgttcattctatacccctgtcgttccatgtaatgagtagtttcctgagttgctatgagaaacgagatcagatttttatcgccatcggagcgaaaaagggaagaggattacagaaaaagggattcctgataacgatggataacaatcgatgcaacttaatacaaagcttatgttacctacgcgtatgcatcctctggtaatatccttctcgcttgagagtatatatatgagaaacaatactgtcaaaatgctgcgttgcaaaacaagagcggaaatatctctggaaatcaaaaggcttttaggcttttaggcacttcgtcaatccttcccaagacactagcttaaccagaaacagaacatattctactatttgtaccacgttaagggccctatacaacctcgattgctaattgaaccgctactgaacacatgatgtcgtttgcacctgacatgggaaactccaacagtttttttgcccttgtattcgtgaagcaattctgcctcttcacataaacgtttagtttataaggaaacgacattgcttcttgaaatttgggtctgttgctgaactgacttcctgcgcacctttattagtaactcatggatttattcaactcgatcgttatacatataatctatctatcgaaaactgactagcgtttacacctgaatatagcccacagatgataagccggcaatactgtaagctcaatcccatcccagtggcatacctatagaatcaggatttcatagcaaggtgtgaattagaaagtcacgccgagtcagccatcgccggttttggccttttctttctttcccagattagcaaagtatttcctacgagataacaaataaaaccggcaatcccgcatataaatatccaaaaattttgtctacccttcacgcattgataaatgaatcccacaatctcaaaaacagtcaagaggagctctctgattcccgggtctgcgaaatattcgagcaaactcttctccccaatctcaaatatgcttaaaagcaatctatcgacattatccaagtacagtatgcaataaggaacagcagtgaatagtggacttccatacagaaaaacatacattctattatttttgtccccggaaagaaaaccggcgatactgtagcctatcatcaaaatagggtaaaggacgagaagcccgcagccaagacaccttagtccgcttattgagtcacctgaactctcactttttaatccctcttttgcatgtttgaaccctcttttggagaataatggattgcggaacaagcgagcggctactttgatcccgtttgttccagagccagtaccgctgttctcgcttccttgctgatcagagatactgtcgtctctttgcgatgagggagagttatgttgtccacgaggactgttctctcttccaccacgattgtggctctcgctggccttactcttactcttcttctttttgttggacatgccaattttctggggccgtccttcttcattcggttaatatcattttggtttcctctgacaatttataacagctaggacattttatgccacaaattaattttccagaaatttaattagagttttcaaattgacgtttaaactacctgtccacctctttgtgtattttatcattttgacgctttcgagtttctcctgcatggaattgtcgcgcggggaggaaacaatcaaggggcggaacagtccgaggtgaaaaatatataaagggcggtaatttagacacaaactgacactcgcggcagcaatggtgtatttaaccaacaagacaatatgagtgtgatcagtgacgaaggtgaaatggatttagagaagtgtgtagagacgtatgaagaggaggaaatagaattaccagaggacagtactagtggaaagttggtatacttccttgtcccatatttcttcgagaaaacatggatatccgacattgtcgcttccctttcagctgcatatggtgcatcattggtacggttagcgtactttagtctgcgagatttttatgatgtttcttttgaaacaaaactttcagacatattttctcccttatggatgatcattcattacttcctatgctttacgttttctttttggaacttcatcgacaataggaaaaaggttaagattgagaccaaagtgctccaacaattattgaaggaagtggctgaaatagacctgaccggggatccagtagcttggcaaagaattgcatctagagttaatcacttttctgaagagacaggatatcggtattcccttttttgcagtggggagcattgtatgcacttttttgtgagagaaatcgtaaaaccaatagaatgtcagacctacgacatccaatgttattgcgaaggagaaatgtacaggaatttttggaaaaatccaccaaataaggtgctaactgagagagcacttgcgaattataacaaaagcgtcgagaattttggtgaattgttacatacggcagaaaaagatggatgtagagatgatactttcgagaagtttcatagtattttcaacacctcaatgttttacttggtgataatagaattagcgctcactgtggttatgatgctggccttcattatctcgatgatttcttatgccatttttcgctacccctcaatagtatgtttatcataagagataaagcatattaaaagccgcccccttcttcgatggctattgtaggctactgtggtgtggcagtcaaaaaacctagttctgaacaataactctactttttgcttaaaatttttaaaaacgatgtcctggaatttccgcgaccaaagcagattttattgacagataattgagaggtcgtcgttagcgggtaaattcttaacgttacaaggccatatcgatctaataagaaagagtttcgtacgctctgaacgcattcgcagcaataccatccaggtcgtggtaaagtaacaattgaccagagacaagcggctagagtaatttcttagtccaaccacatccttataggaaacaagagttttaactctttcaaaaattctttcagaaaagcgaaaacattggctgccatcaaaaaactatcacgtttacctccgctacaggtctttctattttgtgtctctctgattcatttcatagctgtttggtctcattgtcccaagttcacatctagaacggtagttattatactagacagaaatttattctgtctattatgtctacctttggaagcttcattggaatgatgtcatctttaaaggaacatataattaccactaaatgcaatggaagtcaatctggagatagttatcggagaaaatctccacaggtaattacagggctgagttcatacaaatgaggatttttaattaaacttatgaccgtcaatactgattcttttgtttattttttattttttatccttctttcctgattactgtccttatagattagctttgaccaagaggcagtatttttagttaggagagctactccacaggaaataagtactcccagggaccatcggtagcagtacgtgcgatgccaacatattttgagatactatacgttttcactctcaggttgagagtaaaaaatctgatttatttgtctcttcttactctacatttggttgtgtaaactcaacaatttcattcaactcgcaatattcccaagaaacattgccaacggaaagaggcttaaagcaagtcttgtaaaagtctaaacaatgcttaccgtcgaaaaatatattcctagaatgactgctatttccctccatcaaatattgattcatatacctggctatttggtcccatttattcagttcttttccaggactaaattttgttatgatcgccagaaatttgattgcttgcattgtattcatctttggatatgcccaactatggtgaatcgttggaatatctaggacatatactggcaatatatgatatcaattaaaggaaagaatgattttaggtcaaatgcagttatgatttttaacagaggcacaaactgataccaacaaactaagaatctcatgaacaaatatcctcggtaaaagaagaatttgtttctatgggtatctttgggcagctcagaattcattgaggattttggtgagctgtctttcaatgataattcaaaattttcttttattgattgcaaatatcactttgctgagtgaatcatgtcggtttcggtaatataatcaaagttccctttgagatatggtcttaaaacgttatctctaaaattaagttgaacccgttgaccatcatagaaaaagtaaggtgtgttccagatatgttattgataaaggaaatgattcaatctatttgtacttccatcccattatttgatatccattccgggattcaattccaatacttgctgaaccaacaatgtcgtattgggatgcaatctcgaatagcagagccatccaaagggaaatataaatgcaaattcgaaaacaacacggccaatcatgtagaatacaggaacatcttgataagaagcatccattgaaaatgctacccaggcgatagcgcagaatgtacatgagaccacactggggaaacaatgcttcgacatttcataaaacattcatttcaagccattctaaagaggtccctgggtaagacaggcttttgtgattctttatcggattccatgtttgttcttttctatacccctgtcattctatgttgcaagtaccttcctgagttgctatgagaaacgagatcagatttttatcgtcatcggaggagcgaaatggggaggattacagaaaaagaaactcctgataacaatggataacaatcgatgcaagtccgaacaaagttcatgttacctatacatatacacctttctaatgtccttctcgcttgaaagtagaaatatataagaaaatggtattcctggcaaaagtaaaatattccataagatgaggagccttttgggcacttattcggcgcttccatggccattggcttaatcagaaacagatcatattctactgtttgtaccatattgtgggctctttacaacctccatttcaactgaaccactgctgaaaacttgatgtcgtttgcacctgacatgggaagctttgacagtttcttacccctgtgttcgtgaagcaattctgccctattcgcacaaacgttcagtttataagagtacgaccttgcttctttaagcttgtatacgtggctgaactaacgtcgtgatcacttctatcggtacctcatgaatttattcaacttgatggttatatacgatctatctatcgaaaactgactagcatttacacctgaacataacccacatatgataagccggcaatactgtaagctcaatcccatcccagtggcatgcttatataatcaggattttatagcaaggtgtgaattagaaactcacgccgagtcacccgctaccgatcctggccttttctttcttttcacgatcaggataatatttcctagaagataaaaaataaaactgagaatccccaatacaaagattctatacttctgtccacccttgatgcattgataaatgagcccggcaatctcaaaaacagtcaagagaagctctctgattcccgggtctgcgaaatatccgagcaagctcttctcctcaatctcaaatgtgcttaaaagcaatgtatcgacatcatccaagtatcgtatgcaatagggaatagcagtaaatagtggattggcatacacaaaaacatgtatactattatttttgtccccatataaaaaaccggcgatactgtatcctgtcaaaaaccaagggtaaaagaagagacagaagctgcctgcacaccttattacgctttttaatttatctaacctctcaatttttagtacttcttttgcatgcttaaaccctcttttggaaaacaatggattgcggaacaagcgagcggctaatttgatcccgtatgttctagagccagtaccgctgttctcgcttccttgctgatcagagatactgttgcctctttgcggtgagggggggttgtgttgtccgcgaggactgttctctcttccaccacgcttgtggctctcgctggccttactcttactcttctttttgttggacatgccaattttctgtggccgttcttcttcatgccgttaatatcatgttttgatttcctctgacaatttataacagctaggacattttacgccacaaagtaattaattaaagagtttccaaattgaccttcaaattacctgtccacctctttgtgtcaattttatcattttgacgctttcgagtttcttctgcatggaatagtcgcgcggggaagaaataattaaggggcggaacagtctggggtgaaaaatatataaaaggcggcaattcagacacaaactgatattcgcaacagcgatgatgtgtttagccaaagcagtaagatgagtatgataagtgacgacagtgaaacggatttagagaagtgtgtgcagacgtatgaagaggaggaaatagaattgccagaggacagttctggtggaaaattgacatacttccttgctccatatttcttcgagaaaacatggatatccaacattatcctttctcttttaggtgcatatgcttcatcatgcgcaccgttggcgtacttttgtctgcgagacttttatgataataaaattgaaacaaaactttcagacctattttctcctttatggatgatcattcattatttcctatgctttactttttcttttttgaacttcatctacgataggaagaaagttgatattgagacaaaagcgctccgaaagttattgaaggaagtggctcaggtggatctaacaggggatccagtagcttggcggagaattgcatctagagttaatcacttttctgaagaggggggacatcattattccgttttttacagtggagagcattgtatgcgcttttttgtgagagaaatcgtaaaaccaatagagcgtcagacctacgatatccgatgttattttgatggagaaatatgcagcaatttttggaaaaatccaccaaataaggtgttagccgagagagcacttgcgaattataacaagagctttgagaactttggtggattatcacatacggcagaaaaagatggatgtagagatggtattttcgagaagtatcgcaatattttcaacatctcaatgttttacttcatgataatagaaacagtgtcctttgtggttatgatcatggccttcattatctcgatgatttcttgtgccatttttaatttattcgctaccgctcaatagtatgtttttcataggagattaaaagcacattaagagctagtcccttcttcgatgtctattgtaggcttctgtggtatggcagtctaaaaacctcgttctcgttctgaacaatggatctatcttttgattagaacttctcaaaccaatgtctttaaatacccatgaccaaagcaaagtttattgatttagaattgagaggtagtcgttagccggtaaattctttatgttccaaggccacatttatttaatcagaaggaggttcgcacgctctgaacacatccgcagcaatacagcccaggtcacggtatagtaaccattggccagagaaaggcggctcgagcagcttctcaaataaaccatgtccttatcgtaagcaaaagcttctaatctctcaaaaaagcaaaaaacttggttgccgtcgaaaaaaatatcacgtctaccccgtcgttggcatttctatttcttaaatgctgattcgttctcatagctgtttgatctcattgtcccaagttcacacctggaacagcagttattataatagacaaaaattttattctgtcgattacacctacctttggaagcttcattggagtgctataatctttggaggaacataaaatcaccactaaatgccatggacttcaatctggagatggatatgaaaaacttttgacaagtaattacaggggtgagttcatacacataaggattttaattaaacttaggaccgtcaattctaactcttatttttcttttttcctgattactgtccttatagataatctttggccaagaggcaacaaacttagttaggagaattactccacaggaaataagtactcccaaggaccatcagttgcattacctgtgatgctaacatattttgtgatactatacagtgccactctcaggttgtgagtaaaaaacacgatgtatttttctctctttactctactcttctttttgtaaactccacaatttccttcaactctccataaactaagctgtttccaacggaaagtggtttaaagcaagcttggtaacagtctaaacagtgcttaccgtcgaaaaatttattattaggaagatgtttatattcctcagacaaatattgattcatatacctggctatttggtcccatttatccagttcttctccaggactaacttttgttatgattgccaaaaattttattccttgcattatacccatctctggatataccaaccaatagaagctccagttgtctcttgagaaaatttgatcccaaaatatgcaacaaaacaaactaaaaaatgatttctgaaaaagtcccattacgatccccaacaaaatttgatattgacgccgcaaaaatatgattcccatgaacaaatgtcgcgagtgaagcatagatttgtttctgtaggtgtccctgggtagttcagaatttagaaaggattctggcaaattgtcctttaatgatagtttaaaattttcatttattgattgtaggtaaaactttgctgattgtatcttgtccttatcggaaatatcttcaaatttcccttcgagatatggccttaaaacattatctctgaatgcaagttgaccctgttgaccatcataaaaaaagtaaggtgtgttccagatatgttcttggtaaaaggaagagtttaatctattcgcaatttcgtcccatttctcgatatcaagaccaggattcgattttaacacctgctgaaccaacaatgtcgtatcgggatgcgatttcgaataataaagccatccaaagggaaatataaatgcaaattcgaaaacaacacggccaatcatgtagaatccagggacattttgataagaagcatccattgaaaatgctacccaggcgatgacgcagaatgtacatgagaccacactggggaaacaatgcttcgacatttcataaaacattcatttcaagccattctaaagagatccttgggtaagacaggcttttgagatttcttattggattccatgtttgttcattttatacctctgttgttccatgttgtgagtacgttcctgagttgctatgagagatgagatcagatttttatcgtcatcggagcaacatgacgaaaattgcagaaaaaaagattcctgataacaatcgataacaatggaatagataaaactgttcaagaatccaagaagaacattgcatgtcaatacccttgggacagatttatgggacatattataccccgtatctgtcgactgcttgtttgccggatcgatcccagcaactttccagcgcctattaagcagcctcgagtaaatttgattgctgatgaccagtgggttctattatcgaactcatggaaaattgtttttgccgctggccacagaacgtcatggttgaagctgctgctgaatgtagaatcaattaattttatgctataggaaaacacggaagcaacaatacccaaagttagaggtgactggaagctatttaccaaggcaacctgcgaacgcggtagaaatattcagtatttgataagcgaggaagacatgtgaagctggtatcgtggctatatcaacgagtttgccccaagagtgcttaacgagagggaattaaatacaccagaggtggtaaagacaacaccagcataattacttagtccagtatccgattttttttcgacctaggctgctgcacttcgtttctagcattgcagtacctttccaactgttttacctcggtttcaggggaatcttggttcgtcaatttcaacacttttcttttgtatcggctcccagagtaactttaaagtccagaagtaaggaccgcttgtattgggcagcatgaaagtgaaatcagatatggaaatcgaactcatcaaaatgaaaacattacaacaatgagccatagataatcaatatggatacccattgtaagccccatcaccaaagaagaagacaccccaagcacgaattagttaaagaagacgatatacccatcaataaccaccagatgagcgatttgaatagtttccatacatcttttgttttcctttggcggttctccagtgggctttgtgctttagcgtcacaattggaaaaagtgaaatgtttcttacatgcatttatataactatgctcgggcttgtgtcactacttcccactattttacatgtcggtgcggtctgttcatgtttattttgattaacaccatggcttactctcatagcagaaaggatgataaacgactctctaattagatcggaatgatatctggcctggcaaatatacgtctctaattcttttgagtcgaggcaggatcgttgcgagcaagatcaagtgagcaaaaagatggaatatcggacagcgcctctgacatagaagtatgatagtcgacggtagctaaaatgttcactccgaattctctcattacttttaggtttccctcattttgttcaccgtttacaacaaccccaagcatcttgtcacctagcccattactacgaaggtaattcaacgtcaaaaacgtatgatttatcgtgccaagtgtacttcttgccacgagtatgatatagaaaggccgatcgcatttgaaactcaattctttgatgagatccacaatggtctccatttttttcgtaactggaacggcgactccacccgccccttctacaacaagagggtgctcgtcggtgccttcaggaatttcaaaatctgtaagctgtacattaactcctggttcgtagtccattgcttcatatggtgacaatggttttagcagctgatgccgtgggggaaatagatgaggcttccaagaatcgtctaccaatacgttagaaaccgtagcagtgtcaccaatatcagattcaattcctgtttggactggtttccagtagttagctctccatttgtatactagtagcgatgaaatgaaggttttgccaacatcagtgtctgtgcctgtgacgaaaaaaacaggcggtttcattaaggtagaagagaatggatatttgcccatttacctttcgaatagacagaacgaattgttttgcggttttctcatttgtgctggtctcttttatatggttccataatttatgcaatgtttcgttgcagggtttatacgcacgcaagtcaacaggtttttgtgtgctgtattgatagccattccagtatgactatacacgatgactcatgactcatgcggtttgttggtattccagcccacttccacgggcttaattatccaccaaccaccacgcaaaactgttggaggactgttatatgaaaaggctggcccttctccattcccacacactttgtatttaacgtacatgcatcgttgagtttagtgctgtttaggactttacctctcgatgaaacgaggtccaactaagtgaagctttgacagatattatgaaatcacctgaggaaacaaaggctttgttaaggtttgacagggagcacatatggcatccttatacatctatggtgaatccactaccagtgcatctagtgaaggcggcgtatgactgtgagcttattctagaaacgcaggatggaagcgagaatagagtgatcgatggaatgtcatcctggtggtgtgcaatccatggctataaccacaaggaattgaacgatgcactgatatcacaggccagtcaaatgtctcatgtaatgtttggtgggctgacccacaggcctgcaataaatttggtccaaaaattgctaaagatgatgaaccacaaagagctgcagcactgttttctcgctgatagtggttctgtagcagtggaggtggcaatgaagatggctttgcaataccattttactttagggaagccgaaaaagagcaagttcttgaccataagtagcggttatcacggcgataccacaggagctatgagcgtatgcgatccagtagggtcaatgcactcgatttataaagggtatctagccgagaacatttttgccagagggccatccatgattccggtgcttcccacctctggcgtattccgaaagtatggcaagtcattcggcgacagaacaagctggaaagaggatgatatcaatgacgtgcgcgataagatagaaaatcatcatgatgagttgtgtgcagttattctggaaccaattttgcaaggagctggcggaatgagattgtaccacccgcagtttctcatcgaggtaagaaaactgtgcaaccggtaccatatcccacttatactagatgagattgccacagggtttggaagaacgggtacgacatttgctttccatcattgccagatttatcaggaacagaatcacattccgcgcgaaatgcagatagatgtttatccagatataatatgcgtaggaaaagcgctgacaggcgggtacttgacattgagtgccgttgtcactacacccaaaatagcacttggtatctcgtcacccagtagtcccacagggggatgtatgatgcatggccccacgtttatggggaacccactagcttgcgctgttgcaaacaaaagcttggatattctgatgtgcggttattggaagcagcaagtacatagaatagaggaacagttattcgaggagttgttcgtgccgctaatggaaggagctgcagcaaaggagttatggttagtcgaagatgtgaggatcgtcggagcagtaggtgtaattgagctaaaagtatcggtagatcaggagtggtttcaggaggcgtttatctccaaaggggtgtatatcagaccctttaggaacctctgttacatcatgccgccatacattatttccaaggagcagttgaggaaattgaccacgggcttagtttctgccttgagggaatggcatagtgtaagagccaattcgacggtttagatcactaatttacatgaccttgttatggaagattttaggcagcgaccataatccttgtgtttctgtgtaggtgcatattatcatgaagttatgcaataggttaatgtagcaggtcaccacctccatgtagatcccctttttatttatcactcctagtacttcgcactaatctatctgtatgcatcagaacagttaacatttacaccgacagtcttctagcgtgtaccagccgcacgtttaacatttgtagcctcagcaaatgcggaaaaggcttacggttcttggagctgagcaagactagtttcgagatccatcactggtttaatggactgtattttgtctctcgatctgttgtttggtaggcacttgtttaaacaacttcttttttatatgtactgactttactgtcatgttcaaacatgtgataatatataaattgttatcttcatgtattgctatatttgaaatggtgttgttatataaaataaaatgttgggatatacttggtttagatatgtatcaatctgaatgtctatataatatgcgaaatgtattttggaatgcactaactcttgcaacttcaattttttattgtttaggtctcggcgaagaacattcggctggcagaaattaaagaaaagttgtttttaatggtgtatgacacccaagttgggaaggaagttcttgattaggcgtttacaaaaggacatatgttgagatgagatagatctagatatatttgatctttgtaaatgagtacgataaatacccaaggggttggatagaaagaggtgagtagagaattgcgactggtatgagaaactaagatgaaaatattcaatgaatggctttatcaatgggattatatgcgaaaaatggaaagagaaactaaaatccagaagttgtttagcgttttaattaaaggcacttgagattaggtatataatcgtaaagggcatgtattgagataaaaaataagaatagctggaaatcatgaaataagaaaataaaataacgtattggaaaatatattcaagtgaaggtaagacaaaatattgtttaagaactcatacactaattggatctttagttgcagcagaaactaaacaaatttgtccgaaccatccagtcctttcacaaatagccatagatgaatatatgccctatgtctcaagtcctttggttagcatttaaattaatttcaaagagctcgttaaattgaatattgacagcaagttcttagctgttattcgcaaaagaaatctatggtaacaaagtcggaatgactactcgagagataattttaattggtgacgatattgacaattttttttttgaaataataatgtggacgtatatgactcctggaaatgatcaatatttctatgacgagttcgttgctttcgctctagcacctttcatcaatcagggattaaaactaaaaggggagggcattgtgttacggctgtctttagtacaaggatctaaatttccgatttggaacctgtgactttgattcctacgatagagctattcatgctaaaatcaatgaacattggtctaactacatcacgtagtttccaataaaaaggaactgaaccagttat

SEQ ID NO: 126 - DNA, 5694 bp, Candida albicans
atgtcgtataacgataataataatcattattacgaccctaatcaacagggcggtatgccacctcatcaaggaggagaagggtattaccaacaacagtatgatgatatgggtcaacaaccacaccaacaagattattacgatccaaatgctcaatatcaacaacaaccatatgacatggatggatatcaagaccaagccaactatggtggtcaaccaatgaatgcccagggttataatgctgacccagaagccttttctgactttagttatggtggtcaaactcctggaactcctggttatgatcaatacggtactcaatacaccccatctcaaatgagttatggtggtgatccaagatcttctggtgcttcaacaccaatttatggtggtcaaggtcaaggttacgatccaactcaattcaatatgtcatcgaacttgccatatccagcttggtctgctgatcctcaagctccaattaagattgaacacatcgaagatattttcattgatttgactaataaatttggtttccaaagagattctatgagaaacatgtttgattactttatgacattgttggactcgagatcttcccgtatgtcaccagctcaggccttgttgagtttacatgctgattatattggtggtgacaatgccaattatagaaaatggtatttttcttcacaacaagatttggatgattccttaggttttgctaatatgactttaggtaaaattggtagaaaagccagaaaagcttccaagaaatccaaaaaagctagaaaagctgctgaagaacatggtcaagatgtcgatgctcttgctaatgaattagaaggtgattattcattggaagccgctgaaatcagatggaaagccaagatgaactctttgactccagaagaaagagtaagagaccttgctctttatttgttgatatggggtgaagccaatcaagttcgttttactcctgaatgtttgtgttacatttacaaatctgccactgattatttaaattctccattgtgtcaacaaagacaagaaccagtgcctgaaggtgattacttgaaccgtgtgatcactccactttacagattcatcagatctcaagtttatgaaatttatgatggaagatttgtcaagcgtgaaaaagaccacaacaaggtcattggttatgatgatgtcaatcaattgttttggtacccagaaggtatttccagaattatttttgaagatggaaccagattggttgatatccctcaagaagaacgtttcttgaaattaggtgaagttgaatggaagaatgttttcttcaaaacttataaggaaatcagaacctggttgcatttcgttaccaattttaatagaatctggattatccatggtaccatctactggatgtacactgcttacaactccccaaccttgtatactaaacattatgtccaaaccataaatcaacaaccacttgcttcgtcaagatgggctgcttgtgccattggtggtgttcttgcttcatttattcaaattcttgccacacttttcgaatggattttcgtgcctagagaatgggccggtgctcaacatttgagtcgtcgtatgctatttttggtgttaattttcttactcaatttggttccaccagtttatacattccaaattaccaaattggtgatttattcgaaatcggcatatgctgtgtcgattgttggatttttcattgctgtggccactttagtattctttgccgtcatgccattgggtggtttattcacttcatacatgaacaagagatcaagaagatatattgcatcacaaacatttactgccaactacattaaattgaaaggtttagatatgtggatgtcttatttgttatggtttttggttttccttgccaaattggttgaatcttatttcttctcgactttgtctttaagagatcctattagaaacttgtcgaccatgacaatgagatgtgttggtgaagtttggtacaaagatattgtttgtagaaaccaagccaagattgtcttggggttgatgtatcttgttgatttgttattgttctttttggatacttatatgtggtacattatttgtaactgtatcttctccattggtcgttcattctatttgggtatttccattttgactccttggagaaacattttcaccagattgccaaagagaatttattccaagattttagctaccacggaaatggaaatcaaatataaacctaaagttttgatttcacaaatttggaatgccattgttatttccatgtacagagaacatttgttagccattgatcacgttcaaaaattattgtatcatcaagttccatctgaaattgaaggcaagagaactttgagagctccaactttctttgtttctcaagatgacaacaattttgaaacggaatttttcccaagaaattctgaagctgaaagaagaatttcatttttcgctcaatctttggctacaccaatgccagaaccattaccagttgataatatgccaacttttactgttttcactcctcattattcggaaaagattttgttatctttgagagaaatcattagagaagatgatcaattctcaagagtgacattattggaatatttgaaacaattacatccagttgaatgggattgttttgttaaggacaccaagattttggctgaagaaactgctgcttatgaaaatggtgatgattctgaaaaattatctgaagatggattgaaatccaagattgatgatttaccattctattgtattggtttcaagtctgccgcccctgaatatactttaagaacaagaatttgggcttcattgagatcccaaactttgtacagaactgtatctgggtttatgaattatgccagagccattaaattgttatacagagtggaaaacccagaattggttcaatatttcggtggtgaccctgaaggattagaattagctttagaaagaatggccagaagaaagtttagatttttggtttctatgcaaagattgtctaaattcaaagatgatgaaatggaaaatgctgagttcttattgcgtgcttaccctgatttgcaaattgcttacttggatgaagaaccggctttgaatgaggacgaggaaccaagagtatactctgccttgattgatggtcattgtgaaatgttagaaaatggtagacgtcgtcctaaattcagagttcaattgtctggtaatccaattttgggtgatggtaaatctgataatcaaaatcatgcggttattttccatagaggtgaatatattcaattgattgatgctaatcaagataattatttggaagaatgtttgaagattagatcagttttggctgaatttgaagaaatgaatgttgaacatgttaatccatatgcaccaaatttgaaatctgaagataataacaccaagaaggatccagtggcatttttgggtgctagagaatatattttctcagaaaattctggtgttttgggtgatgttgctgctggtaaagaacaaacttttggtacattgtttgcaagaactttggcacaaattggaggtaaattgcattatggtcatccggattttttgaatgctacatttatgttaactagaggtggtgtttctaaagcacaaaagggtttacatttgaatgaagatatttatgctggtatgaatgccatgatgagaggtggtaaaatcaagcattgtgaatattatcaatgtggtaaaggtagagatttaggttttggatccattttgaatttcaccaccaagattggtgctggtatgggagaacaaatgctttcaagagaatatttctatttgggtactcaacttccattggatagatttttgtcattttactatggtcatccaggtttccatattaataacttgtttattcaattgtctttacaagtgtttattttggtgttgggtaacttgaattcattagctcatgaagctatcatgtgttcttacaacaaagatgtcccagttactgatgttttgtatccatttggttgttacaatattgctcctgccgttgattggattagacgttatactttgtctattttcattgttttcttcatttctttcattccattggttgtacaagaattgattgaaagaggggtatggaaagcgttccaaagatttgttagacattttatttccatgtcaccatttttcgaagttttcgttgcccaaatttattcatcatcggttttcactgatttgaccgttggtggtgctagatatatttccactggtagaggttttgccacttcaagaattccattttcaatcttgtattcacgttttgctgattcatccatttatatgggagcaagattgatgttgattttattatttggtacagtttctcattggcaagcaccattattatggttctgggcttcattatcggctttaatgttctccccattcattttcaatcctcatcaatttgcttgggaagactttttccttgattacagagatttcattagatggttatctagaggtaacactaaatggcacagaaactcatggattggttatgttagactttctagatcacgtatcactggtttcaaacgtaagttgactggtgatgtttctgaaaaagctgctggtgatgcttcaagagctcatagatccaatgttttgtttgctgatttcttaccaacattgatttatactgctggtctttatgttgcttatacttttattaatgctcaaactggggttactagttatccatatgaaatcaatggatctactgatccacaaccagttaattctactttgagacttattatttgtgctttagctccagttgttattgatatgggatgtttaggtgtttgtcttgccatggcatgttgtgctggtccaatgttaggattatgttgtaaaaagactggtgctgttattgctggtgttgcccatggtgttgccgtcattgttcatattattttctttattgttatgtgggtcactgaaggtttcaattttgccagattaatgttgggtattgccaccatgatttatgttcaaagattattattcaagtttttgacattatgtttcttgactagagaatttaagaatgataaagccaatactgctttctggactggtaaatggtataatactggtatgggatggatggcttttactcaaccatctcgtgaatttgttgctaaaatcattgaaatgtcggaatttgctggtgatttcgttttggcacatattatattattctgtcaattaccattattgtttattccattagttgatagatggcattcaatgatgttattctggttgaaaccatcaagattgattagaccaccaatttattctttgaaacaagccagattaagaaagagaatggtgagaaaatattgtgttttatattttgccgtgttgatattatttattgtcattattgttgcaccagcagttgcttcgggacaaattgctgttgatcaatttgccaatattggtggatctggttctattgctgatggattattccaaccaagaaatgtcagtaataatgatactggtaatcatagaccaaaaacctacacttggagttatttgagtactcgttttactggaagtaccaccccttattctacaaatccattcagagtttag

SEQ ID NO: 127 - DNA, 5694 bp, Candida albicans
atgtcgtataacgataataataatcattattacgaccctaatcaacagggcggtatgccacctcatcaaggaggagaagggtattaccaacaacagtatgatgatatgggtcaacaaccacaccaacaagattattacgatccaaatgctcaatatcaacaacaaccatatgacatggatggatatcaagaccaagccaactatggtggtcaaccaatgaatgcccagggttataatgctgacccagaagccttttctgactttagttatggtggtcaaactcctggaactcctggttatgatcaatacggtactcaatacaccccatctcaaatgagttatggtggtgatccaagatcttctggtgcttcaacaccaatttatggtggtcaaggtcaaggttacgatccaactcaattcaatatgtcatcgaacttgccatatccagcttggtctgctgatcctcaagctccaattaagattgaacacatcgaagatattttcattgatttgactaataaatttggtttccaaagagattctatgagaaacatgtttgattactttatgacattgttggactcgagatcttcccgtatgtcaccagctcaggccttgttgagtttacatgctgattatattggtggtgacaatgccaattatagaaaatggtatttttcttcacaacaagatttggatgattccttaggttttgctaatatgactttaggtaaaattggtagaaaagccagaaaagcttccaagaaatccaaaaaagctagaaaagctgctgaagaacatggtcaagatgtcgatgctcttgctaatgaattagaaggtgattattcattggaagccgctgaaatcagatggaaagccaagatgaactctttgactccagaagaaagagtaagagaccttgctctttatttgttgatatggggtgaagccaatcaagttcgttttactcctgaatgtttgtgttacatttacaaatctgccactgattatttaaattctccattgtgtcaacaaagacaagaaccagtgcctgaaggtgattacttgaaccgtgtgatcactccactttacagattcatcagatctcaagtttatgaaatttatgatggaagatttgtcaagcgtgaaaaagaccacaacaaggtcattggttatgatgatgtcaatcaattgttttggtacccagaaggtatttccagaattatttttgaagatggaaccagattggttgatatccctcaagaagaacgtttcttgaaattaggtgaagttgaatggaagaatgttttcttcaaaacttataaggaaatcagaacctggttgcatttcgttaccaattttaatagaatctggattatccatggtaccatctactggatgtacactgcttacaactccccaaccttgtatactaaacattatgtccaaaccataaatcaacaaccacttgcttcgtcaagatgggctgcttgtgccattggtggtgttcttgcttcatttattcaaattcttgccacacttttcgaatggattttcgtgcctagagaatgggccggtgctcaacatttgagtcgtcgtatgctatttttggtgttaattttcttactcaatttggttccaccagtttatacattccaaattaccaaattggtgatttattcgaaatcggcatatgctgtgtcgattgttggatttttcattgctgtggccactttagtattctttgccgtcatgccattgggtggtttattcacttcatacatgaacaagagatcaagaagatatattgcatcacaaacatttactgccaactacattaaattgaaaggtttagatatgtggatgtcttatttgttatggtttttggttttccttgccaaattggttgaatcttatttcttctcgactttgtctttaagagatcctattagaaacttgtcgaccatgacaatgagatgtgttggtgaagtttggtacaaagatattgtttgtagaaaccaagccaagattgtcttggggttgatgtatcttgttgatttgttattgttctttttggatacttatatgtggtacattatttgtaactgtatcttctccattggtcgttcattctatttgggtatttccattttgactccttggagaaacattttcaccagattgccaaagagaatttattccaagattttagctaccacggaaatggaaatcaaatataaacctaaagttttgatttcacaaatttggaatgccattgttatttccatgtacagagaacatttgttagccattgatcacgttcaaaaattattgtatcatcaagttccatctgaaattgaaggcaagagaactttgagagctccaactttctttgtttctcaagatgacaacaattttgaaacggaatttttcccaagaaattctgaagctgaaagaagaatttcatttttcgctcaatctttggctacaccaatgccagaaccattaccagttgataatatgccaacttttactgttttcactcctcattattcggaaaagattttgttatctttgagagaaatcattagagaagatgatcaattctcaagagtgacattattggaatatttgaaacaattacatccagttgaatgggattgttttgttaaggacaccaagattttggctgaagaaactgctgcttatgaaaatggtgatgattctgaaaaattatctgaagatggattgaaatccaagattgatgatttaccattctattgtattggtttcaagtctgccgcccctgaatatactttaagaacaagaatttgggcttcattgagatcccaaactttgtacagaactgtatctgggtttatgaattatgccagagccattaaattgttatacagagtggaaaacccagaattggttcaatatttcggtggtgaccctgaaggattagaattagctttagaaagaatggccagaagaaagtttagatttttggtttctatgcaaagattgtctaaattcaaagatgatgaaatggaaaatgctgagttcttattgcgtgcttaccctgatttgcaaattgcttacttggatgaagaaccggctttgaatgaggacgaggaaccaagagtatactctgccttgattgatggtcattgtgaaatgttagaaaatggtagacgtcgtcctaaattcagagttcaattgtctggtaatccaattttgggtgatggtaaatctgataatcaaaatcatgcggttattttccatagaggtgaatatattcaattgattgatgctaatcaagataattatttggaagaatgtttgaagattagatcagttttggctgaatttgaagaaatgaatgttgaacatgttaatccatatgcaccaaatttgaaatctgaagataataacaccaagaaggatccagtggcatttttgggtgctagagaatatattttctcagaaaattctggtgttttgggtgatgttgctgctggtaaagaacaaacttttggtacattgtttgcaagaactttggcacaaattggaggtaaattgcattatggtcatccggattttttgaatgctacatttatgttaactagaggtggtgtttctaaagcacaaaagggtttacatttgaatgaagatatttatgctggtatgaatgccatgatgagaggtggtaaaatcaagcattgtgaatattatcaatgtggtaaaggtagagatttaggttttggatccattttgaatttcaccaccaagattggtgctggtatgggagaacaaatgctttcaagagaatatttctatttgggtactcaacttccattggatagatttttgtcattttactatggtcatccaggtttccatattaataacttgtttattcaattgtctttacaagtgtttattttggtgttgggtaacttgaattcattagctcatgaagctatcatgtgttcttacaacaaagatgtcccagttactgatgttttgtatccatttggttgttacaatattgctcctgccgttgattggattagacgttatactttgtctattttcattgttttcttcatttctttcattccattggttgtacaagaattgattgaaagaggggtatggaaagcgttccaaagatttgttagacattttatttccatgtcaccatttttcgaagttttcgttgcccaaatttattcatcatcggttttcactgatttgaccgttggtggtgctagatatatttccactggtagaggttttgccacttcaagaattccattttcaatcttgtattcacgttttgctgattcatccatttatatgggagcaagattgatgttgattttattatttggtacagtttctcattggcaagcaccattattatggttctgggcttcattatcggctttaatgttctccccattcattttcaatcctcatcaatttgcttgggaagactttttccttgattacagagatttcattagatggttatctagaggtaacactaaatggcacagaaactcatggattggttatgttagactttctagatcacgtatcactggtttcaaacgtaagttgactggtgatgtttctgaaaaagctgctggtgatgcttcaagagctcatagatccaatgttttgtttgctgatttcttaccaacattgatttatactgctggtctttatgttgcttatacttttattaatgctcaaactggggttactagttatccatatgaaatcaatggatctactgatccacaaccagttaattctactttgagacttattatttgtgctttagctccagttgttattgatatgggatgtttaggtgtttgtcttgccatggcatgttgtgctggtccaatgttaggattatgttgtaaaaagactggtgctgttattgctggtgttgcccatggtgttgccgtcattgttcatattattttctttattgttatgtgggtcactgaaggtttcaattttgccagattaatgttgggtattgccaccatgatttatgttcaaagattattattcaagtttttgacattatgtttcttgactagagaatttaagaatgataaagccaatactgctttctggactggtaaatggtataatactggtatgggatggatggcttttactcaaccatctcgtgaatttgttgctaaaatcattgaaatgtcggaatttgctggtgatttcgttttggcacatattatattattctgtcaattaccattattgtttattccattagttgatagatggcattcaatgatgttattctggttgaaaccatcaagattgattagaccaccaatttattctttgaaacaagccagattaagaaagagaatggtgagaaaatattgtgttttatattttgccgtgttgatattatttattgtcattattgttgcaccagcagttgcttcgggacaaattgctgttgatcaatttgccaatattggtggatctggttctattgctgatggattattccaaccaagaaatgtcagtaataatgatactggtaatcatagaccaaaaacctacacttggagttatttgagtactcgttttactggaagtaccaccccttattctacaaatccattcagagtttaa

SEQ ID NO: 128 - DNA, 5694 bp, Candida albicans; identical to SEQ ID NO: 127

SEQ ID NO: 129 - DNA, 5694 bp, Unknown
  Unclassified
atgtcgtataacgataataataatcattattacgaccctaatcaacagggcggtatgccacctcatcaaggaggagaagggtattaccaacaacagtatgatgatatgggtcaacaaccacaccaacaagattattacgatccaaatgctcaatatcaacaacaaccatatgacatggatggatatcaagaccaagccaactatggtggtcaaccaatgaatgcccagggttataatgctgacccagaagccttttctgactttagttatggcggtcaaactcctggaactcctggttatgatcaatacggtactcaatacaccccatctcaaatgagttatggtggtgatccaagatcttctggtgcttcaacaccaatttatggtggtcaaggtcaaggttacgatccaactcaattcaatatgtcatcgaacttgccatatccagcttggtctgctgatcctcaagctccaattaagattgaacacatcgaagatattttcattgatttgactaataaatttggtttccaaagagattctatgagaaacatgtttgattactttatgacattgttggactcgagatcttcccgtatgtcaccagctcaggccttgttgagtttacatgctgattatattggtggtgacaatgccaattatagaaaatggtatttttcttcacaacaagatttggatgattccttaggttttgctaatatgactttaggtaaaattggtagaaaagccagaaaggcttccaagaaatccaaaaaagctagaaaagctgctgaagaacatggtcaagatgtcgatgctcttgctaatgaattagaaggtgattattcattggaagccgctgaaatcagatggaaagccaagatgaactctttgactccagaagaaagagtaagagaccttgctctttatttgttgatatggggtgaagccaatcaagttcgttttactcctgaatgtttgtgttacatttacaaatctgccactgattatttaaattctccattgtgtcaacaaagacaagaaccagtgcctgaaggtgattatttgaaccgtgtgatcactccactttacagattcatcagatctcaagtttatgaaatttatgatggaagatttgtcaagcgtgaaaaagaccacaacaaggtcattggttatgatgatgtcaatcaattgttttggtacccagaaggtatttccagaattatttttgaagatggaaccagattggttgatatccctcaagaagaacgtttcttgaaattaggtgaagttgaatggaagaatgttttcttcaaaacttataaggaaatcagaacctggttgcatttcgttaccaattttaatagaatctggattatccatggtaccatctactggatgtacactgcttacaactccccaaccttgtatactaaacattatgtccaaaccataaatcaacaaccacttgcttcgtcaagatgggctgcttgtgccattggtggtgttcttgcttcatttattcaaattcttgccacacttttcgaatggattttcgtgcctagagaatgggccggtgctcaacatttgagtcgtcgtatgctatttttggtgttaattttcttactcaatttggttccaccagtttatacattccaaattaccaaattggtgatttattcgaaatcggcatatgctgtgtcgattgttggatttttcattgctgtggccactttagtattctttgccgtcatgccattgggtggtttattcacttcatacatgaacaagagatcaagaagatatattgcatcacaaacatttactgccaactacattaaattgaaaggtttagatatgtggatgtcttatttgttatggtttttggttttccttgccaaattggttgaatcttatttcttcttgacattgtctttaagagatcctattagaaacttgtcgaccatgacaatgagatgtgttggtgaagtttggtacaaagatattgtttgtagaaaccaagccaagattgtcttggggttgatgtatcttgttgatttgttattgttctttttggatacttatatgtggtacattatttgtaactgtatcttctccattggtcgttcattctatttgggtatttccattttgactccttggagaaacattttcaccagattgccaaagagaatttattccaagattttagctaccacggaaatggaaatcaaatataaacctaaagttttgatttcacaaatttggaatgccattgttatttccatgtacagagaacatttgttagccattgatcacgttcaaaaattattgtatcatcaagtcccatctgaaattgaaggtaagagaactttgagagctccaactttctttgtttctcaagatgacaacaattttgaaacggaatttttcccaagaaattctgaagctgaaagaagaatttcatttttcgctcaatctttggctacaccaatgccagaaccattaccagttgataatatgccaacttttactgttttcactcctcattattcggaaaagattttgttatctttgagagaaatcattagagaagatgatcaattctcaagagtgacattattggaatatttgaaacaattacatccagttgaatgggattgttttgttaaggacaccaagattttggctgaagaaactgctgcttatgaaaatggtgatgattctgaaaaattatctgaagatggattgaaatccaagattgatgatttaccattctattgtattggtttcaagtctgccgcccctgaatatactttaagaacaagaatttgggcttcattgagatcccaaactttgtacagaactgtatctgggtttatgaattatgccagagccattaaattgttatacagagtggaaaacccagaattggttcaatatttcggtggtgatcctgaaggattagaattagctttagaaagaatggccagaagaaagtttagatttttggtttctatgcaaagattgtctaaattcaaagatgatgaaatggaaaatgctgagttcttattgcgtgcttaccctgatttgcaaattgcttacttggatgaagaaccggctttgaatgaggacgaggaaccaagagtatactctgccttgattgatggtcattgtgaaatgttagaaaatggtagacgtcgtcctaaattcagagttcaattgtctggtaatccaattttgggtgatggtaaatctgataatcaaaatcatgcggttattttccatagaggtgaatatattcaattgattgatgctaatcaagataattatttggaagaatgtttgaagattagatcagttttggctgaatttgaagaaatgaatgttgaacatgttaatccatatgcaccaaatttgaaatctgaagataataacaccaagaaggatccagtggcatttttgggtgctagagaatatattttctcagaaaattctggtgttttgggtgatgttgctgctggtaaagaacaaacttttggtacattgtttgcaagaactttggcacaaattggaggtaaattgcattatggtcatccggattttttgaatgctacatttatgttaactagaggtggtgtttctaaagcacaaaagggtttacatttgaatgaagatatttatgctggtatgaatgccatgatgagaggtggtaaaatcaagcattgtgaatattatcaatgtggtaaaggtagagatttaggttttggatccattttgaatttcaccaccaagattggtgctggtatgggagaacaaatgctttcaagagaatatttctatttgggtactcaacttccattggatagatttttgtcattttactatggtcatccaggtttccatattaataacttgtttattcaattgtctttacaagtgtttattttggtgttggctaacttgaattcattagctcatgaagctatcatgtgttcttacaacaaagatgtcccagttactgatgttttgtatccatttggttgttacaatattgctcctgccgttgattggattagacgttatactttgtctattttcattgttttcttcatttctttcattccattggttgtacaagaattgattgaaagaggggtatggaaagcgttccaaagatttgttagacattttatttccatgtcaccatttttcgaagttttcgttgctcaaatttattcatcatcggttttcactgatttgaccgttggtggtgctagatatatttccactggtagaggttttgccacttcaagaattccattttcaatcttgtattcacgttttgctgattcatccatttatatgggagcaagattgatgttgattttattatttggtacagtttctcattggcaagcaccattattatggttctgggcttcattatcggctttaatgttctccccattcattttcaatcctcatcaatttgcttgggaagactttttccttgattacagagatttcattagatggttatctagaggtaacactaaatggcacagaaactcatggattggttatgttagactttctagatcacgtatcactggtttcaaacgtaagttgactggtgatgtttctgaaaaagctgctggtgatgcttcaagagctcatagatccaatgttttgtttgctgatttcttaccaacattgatttatactgctggtctttatgttgcttatacttttattaatgctcaaactggggttactagttatccatatgaaatcaatggatctactgatccacaaccagttaattctactttgagacttattatttgtgctttagctccagttgttattgatatgggatgtttaggtgtttgtcttgccatggcatgttgtgctggtccaatgttaggattatgttgtaaaaagactggtgctgttattgctggtgttgcccatggtgttgccgtcattgttcatattattttctttattgttatgtgggtcactgaaggtttcaattttgccagattaatgttgggtattgccaccatgatttatgttcaaagattattattcaagtttttgacattatgtttcttgactagagaatttaagaatgataaagccaatactgctttctggactggtaaatggtataatactggtatgggatggatggcttttactcaaccatctcgtgaatttgttgctaaaatcattgaaatgtcggaatttgctggtgatttcgttttggcacatattattttattctgtcaattaccatttttgtttattccattagttgatagatggcattcaatgatgttattctggttgaaaccatcaagattaattagaccaccaatttattctttgaaacaagccagattaagaaagagaatggtgagaaaatattgtgttttatattttgccgtgttgatattatttattgtcattattgttgcaccagcagttgcttcgggacaaattgctgttgatcaatttgccaatattggtggatctggttctattgctgatggattattccaaccaagaaatgtcagtaataatgatactggtaatcatagaccaaaaacctacacttggagttatttgagtactcgttttactggaagtaccaccccttattctacaaatccattcagagtttaa

SEQ ID NO: 130 - DNA, 6473 bp, Unknown
  Unclassified
gaattctaaaattagcaaaaaaaaattgtgtgtgcgtgtgagttggtaaaagaaacgaaaaaaaagcaatttttacatttgctatcttcagttttaaggcatttgattacccaatttgaaataagtccaaaagatatccatttaaaacaaacagtatttcctgtatttatcaatttatcaaagaatctagcattcatatataatcaatctaacttcttggtgtttaagaaatcctcctactactcacaaatctcgagcaaaattttttttttgtttgatctcatacgatttcaggtacaatttttttaaaaggaaaaagtttgcaatatcttacataatttggattgctgtttttattatagggtcagattcacatttccagatctcaatagaaacccagtttcccattaatttaagagatatcagtttatttcgattacaaattgagttgtcacaactacgtttcacatatactattatttcaatttcccatcattgcaacaacaaacgaaaaattaattcttgattttgctgtttttttttgtgaacaaaaagcacacaaacatacacacaatacatttaataacaacaattttcaaaataataataacttttcctttttcttttaatttccccccttctttttttttaaatattaaaaaccaacacccaactgatatactaacttatcttttttttcaaattagatgtcgtataacgataataataatcattattacgaccctaatcaacagggcggtatgccacctcatcaaggaggagaagggtattaccaacaacagtatgatgatatgggtcaacaaccacaccaacaagattattacgatccaaatgctcaatatcaacaacaaccatatgacatggatggatatcaagaccaagccaactatggtggtcaaccaatgaatgcccagggttataatgctgacccagaagccttttctgactttagttatggtggtcaaactcctggaactcctggttatgatcaatacggtactcaatacaccccatctcaaatgagttatggtggtgatccaagatcttctggtgcttcaacaccaatttatggtggtcaaggtcaaggttacgatccaactcaattcaatatgtcatcgaacttgccatatccagcttggtctgctgatcctcaagctccaattaagattgaacacatcgaagatattttcattgatttgactaataaatttggtttccaaagagattctatgagaaacatgtttgattactttatgacattgttggactcgagatcttcccgtatgtcaccagctcaggccttgttgagtttacatgctgattatattggtggtgacaatgccaattatagaaaatggtatttttcttcacaacaagatttggatgattccttaggttttgctaatatgactttaggtaaaattggtagaaaagccagaaaagcttccaagaaatccaaaaaagctagaaaagctgctgaagaacatggtcaagatgtcgatgctcttgctaatgaattagaaggtgattattcattggaagccgctgaaatcagatggaaagccaagatgaactctttgactccagaagaaagagtaagagaccttgctctttatttgttgatatggggtgaagccaatcaagttcgttttactcctgaatgtttgtgttacatttacaaatctgccactgattatttaaattctccattgtgtcaacaaagacaagaaccagtgcctgaaggtgattacttgaaccgtgtgatcactccactttacagattcatcagatctcaagtttatgaaatttatgatggaagatttgtcaagcgtgaaaaagaccacaacaaggtcattggttatgatgatgtcaatcaattgttttggtacccagaaggtatttccagaattatttttgaagatggaaccagattggttgatatccctcaagaagaacgtttcttgaaattaggtgaagttgaatggaagaatgttttcttcaaaacttataaggaaatcagaacctggttgcatttcgttaccaattttaatagaatctggattatccatggtaccatctactggatgtacactgcttacaactccccaaccttgtatactaaacattatgtccaaaccataaatcaacaaccacttgcttcgtcaagatgggctgcttgtgccattggtggtgttcttgcttcatttattcaaattcttgccacacttttcgaatggattttcgtgcctagagaatgggccggtgctcaacatttgagtcgtcgtatgctatttttggtgttaattttcttactcaatttggttccaccagtttatacattccaaattaccaaattggtgatttattcgaaatcggcatatgctgtgtcgattgttggatttttcattgctgtggccactttagtattctttgccgtcatgccattgggtggtttattcacttcatacatgaacaagagatcaagaagatatattgcatcacaaacatttactgccaactacattaaattgaaaggtttagatatgtggatgtcttatttgttatggtttttggttttccttgccaaattggttgaatcttatttcttctcgactttgtctttaagagatcctattagaaacttgtcgaccatgacaatgagatgtgttggtgaagtttggtacaaagatattgtttgtagaaaccaagccaagattgtcttggggttgatgtatcttgttgatttgttattgttctttttggatacttatatgtggtacattatttgtaactgtatcttctccattggtcgttcattctatttgggtatttccattttgactccttggagaaacattttcaccagattgccaaagagaatttattccaagattttagctaccacggaaatggaaatcaaatataaacctaaagttttgatttcacaaatttggaatgccattgttatttccatgtacagagaacatttgttagccattgatcacgttcaaaaattattgtatcatcaagttccatctgaaattgaaggcaagagaactttgagagctccaactttctttgtttctcaagatgacaacaattttgaaacggaatttttcccaagaaattctgaagctgaaagaagaatttcatttttcgctcaatctttggctacaccaatgccagaaccattaccagttgataatatgccaacttttactgttttcactcctcattattcggaaaagattttgttatctttgagagaaatcattagagaagatgatcaattctcaagagtgacattattggaatatttgaaacaattacatccagttgaatgggattgttttgttaaggacaccaagattttggctgaagaaactgctgcttatgaaaatggtgatgattctgaaaaattatctgaagatggattgaaatccaagattgatgatttaccattctattgtattggtttcaagtctgccgcccctgaatatactttaagaacaagaatttgggcttcattgagatcccaaactttgtacagaactgtatctgggtttatgaattatgccagagccattaaattgttatacagagtggaaaacccagaattggttcaatatttcggtggtgaccctgaaggattagaattagctttagaaagaatggccagaagaaagtttagatttttggtttctatgcaaagattgtctaaattcaaagatgatgaaatggaaaatgctgagttcttattgcgtgcttaccctgatttgcaaattgcttacttggatgaagaaccggctttgaatgaggacgaggaaccaagagtatactctgccttgattgatggtcattgtgaaatgttagaaaatggtagacgtcgtcctaaattcagagttcaattgtctggtaatccaattttgggtgatggtaaatctgataatcaaaatcatgcggttattttccatagaggtgaatatattcaattgattgatgctaatcaagataattatttggaagaatgtttgaagattagatcagttttggctgaatttgaagaaatgaatgttgaacatgttaatccatatgcaccaaatttgaaatctgaagataataacaccaagaaggatccagtggcatttttgggtgctagagaatatattttctcagaaaattctggtgttttgggtgatgttgctgctggtaaagaacaaacttttggtacattgtttgcaagaactttggcacaaattggaggtaaattgcattatggtcatccggattttttgaatgctacatttatgttaactagaggtggtgtttctaaagcacaaaagggtttacatttgaatgaagatatttatgctggtatgaatgccatgatgagaggtggtaaaatcaagcattgtgaatattatcaatgtggtaaaggtagagatttaggttttggatccattttgaatttcaccaccaagattggtgctggtatgggagaacaaatgctttcaagagaatatttctatttgggtactcaacttccattggatagatttttgtcattttactatggtcatccaggtttccatattaataacttgtttattcaattgtctttacaagtgtttattttggtgttgggtaacttgaattcattagctcatgaagctatcatgtgttcttacaacaaagatgtcccagttactgatgttttgtatccatttggttgttacaatattgctcctgccgttgattggattagacgttatactttgtctattttcattgttttcttcatttctttcattccattggttgtacaagaattgattgaaagaggggtatggaaagcgttccaaagatttgttagacattttatttccatgtcaccatttttcgaagttttcgttgcccaaatttattcatcatcggttttcactgatttgaccgttggtggtgctagatatatttccactggtagaggttttgccacttcaagaattccattttcaatcttgtattcacgttttgctgattcatccatttatatgggagcaagattgatgttgattttattatttggtacagtttctcattggcaagcaccattattatggttctgggcttcattatcggctttaatgttctccccattcattttcaatcctcatcaatttgcttgggaagactttttccttgattacagagatttcattagatggttatctagaggtaacactaaatggcacagaaactcatggattggttatgttagactttctagatcacgtatcactggtttcaaacgtaagttgactggtgatgtttctgaaaaagctgctggtgatgcttcaagagctcatagatccaatgttttgtttgctgatttcttaccaacattgatttatactgctggtctttatgttgcttatacttttattaatgctcaaactggggttactagttatccatatgaaatcaatggatctactgatccacaaccagttaattctactttgagacttattatttgtgctttagctccagttgttattgatatgggatgtttaggtgtttgtcttgccatggcatgttgtgctggtccaatgttaggattatgttgtaaaaagactggtgctgttattgctggtgttgcccatggtgttgccgtcattgttcatattattttctttattgttatgtgggtcactgaaggtttcaattttgccagattaatgttgggtattgccaccatgatttatgttcaaagattattattcaagtttttgacattatgtttcttgactagagaatttaagaatgataaagccaatactgctttctggactggtaaatggtataatactggtatgggatggatggcttttactcaaccatctcgtgaatttgttgctaaaatcattgaaatgtcggaatttgctggtgatttcgttttggcacatattatattattctgtcaattaccattattgtttattccattagttgatagatggcattcaatgatgttattctggttgaaaccatcaagattgattagaccaccaatttattctttgaaacaagccagattaagaaagagaatggtgagaaaatattgtgttttatattttgccgtgttgatattatttattgtcattattgttgcaccagcagttgcttcgggacaaattgctgttgatcaatttgccaatattggtggatctggttctattgctgatggattattccaaccaagaaatgtcagtaataatgatactggtaatcatagaccaaaaacctacacttggagttatttgagtactcgttttactggaagtaccaccccttattctacaaatccattcagagtttaagagtttaagagattaagcggggggcggaagtggtttattcatttataattatttcatttattcataaatggt

SEQ ID NO: 131 - DNA, 5694 bp, Unknown; identical to SEQ ID NO: 127
  Unclassified

SEQ ID NO: 132 - DNA, 1689 bp, Unknown
  Unclassified
tcactttcaaaaattatgtatcatcaagttccatctgaaattgaaggcaagagaactttgagagctccaactatctttgtttctcaagacgacaacaattttgaaacggaatttttcccaagaaattctgaagctgaaagaagaatttcatttttcgctcaatctttggctacaccaatgccagaaccattaccagttgataatatgccaacttttactgttttcactcctcattattcggaaaagattttgttatctttgagagaaatcattagagaagatgatcaattctcaagagtgacattattggaatatttgaaacaattacatccagttgaatgggattgttttgttaaggacaccaagattttggctgaagaaactgctgcttatgaaaatggtgatgattctgaaaaattatctgaagatggattgaaatccaagattgatgatttaccattctattgtattggtttcaagtctgccgcccctgaatatactttaagaacaagaatttgggcttcattgagatcccaaactttgtacagaactgtatctgggtttatgaattatgccagagccattaaattgttatacagagtggaaaacccagaattggttcaatatttcggtggtgaccctgaaggattagaattagctttagaaagaatggccagaagaaagtttagatttttggtttctatgcaaagattgtctaaattcaaagatgatgaaatggaaaatgctgagttcttattgcgtgcttaccctgatttgcaaattgcttacttggatgaagaaccggctttgaatgaggacgaggaaccaagagtatactctgccttgattgatggtcattgtgaaatgttagaaaatggtagacgtcgtcctaaattcagagttcaattgtctggtaatccaattttgggtgatggtaaatctgataatcaaaatcatgcggttattttccatagaggtgaatatattcaattgattgatgctaatcaagataattatttggaagaatgtttgaagattagatcagttttggctgaatttgaagaaatgaatgttgaacatgttaatccatatgcaccaaatttgaaatctgaagataataacaccaagaaggatccagtggcatttttgggtgctagagaatatattttctcagaaaattctggtgttttgggtgatgttgctgctggtaaagaacaaacttttggtacattgtttgcaagaactttggcacaaattggaggtaaattgcattatggtcatccggattttttgaatgctacatttatgttaactagaggtggtgtttctaaagcacaaaagggtttacatttgaatgaagatatttatgctggtatgaatgccatgatgagaggtggtaaaatcaagcattgtgaatattatcaatgtggtaaaggtagagatttaggttttggatccattttgaatttcaccaccaagattggtgctggtatgggagaacaaatgctttcaagagaatatttctatttgggtactcaacttccattggatagatttttgtcattttactatggtcatccaggtttccatattaataacttgtttattcaattgtctttacaagtgtttattttggtgttggctaacttgaattcattagctcatgaggctatcatgtgttcggtccac

SEQ ID NO: 133 - DNA, 5694 bp, Candida albicans; identical to SEQ ID NO: 126

SEQ ID NO: 134 - DNA, 5694 bp, Candida albicans; identical to SEQ ID NO: 127

SEQ ID NO: 135 - DNA, 6473 bp, Candida albicans; identical to SEQ ID NO: 130

SEQ ID NO: 136 - DNA, 5154 bp, Saccharomyces pastorianus
atgaacgctgatcaacatccttaccaggatcaaacggtataccctcaggagcaaggggaaggtcaaggtcaagagcaggactacgaccagtatggccagcctttgtatcctcaacaaactgatggttactacgacccagctatggccgccggtaacgaagctgatatgtacggtcaacagccaccaaacgactcttatgaccaagaatacacaaacggcgaatactatggccaaccgccaaacatggctgcgcaagacggtgaaaacttctccgatttcagcagttacggcccccctggcacccctggctatgacagctatggtggccagtacaccccttctcaaatgagttacggagaacctaactcatctggtacttccacccccgtctatggtaactacgatccaaacgctattgctatggctttaccgaatgaaccttatcctgcttggactgcagactctcaatctcccgtctctatcgagcaaatagaagatatcttcatcgatttgacaaatagactagggttccaaagagactccatgagaaatgtcttcgaccactttatggttcttttggattcgaggtcttcgagaatgtcaccagatcaagctttgctatccctacatgccgattatatcggtggtgatactgccaattacaaaaaatggtatttcgctgctcaattagatttggatgacgatatcggtttcagaaatatgagtcttggtaagctatcaagaaaggcaagaaaggctaagaagaagaataagaaggccatggaagaggcggaccctgaagatgctgaagaaaccttaaataaaatcgaaggtgacaactctttagaagccgctgatttcagatggaaagcaaaaatgaaccagttgtccccactggaaagagttcgccaaatcgccctatacctattgtgttggggtgaagctaatcaagtcaggttcacagcagagtgtttgtgttttatttacaagtgtgctgctgattatttggattctcctctctgccaacaacgtcaagaacccatgccagaaggtgatttcttgaacagagtcataacaccgctatatcaattcattagaaatcaagtttacgaagttgttgatggtcgttttgtcaaacgtgaaagagaccacaacgaagtcattgggtacgatgacttaaatcaattgttttggtacccagaaggtattgctaagatcgtttttgaagatggaaccaagttgattgagttaccagtcgaagaacgttatttaagattaggcgatgttgtctggcgcgatgtcttttttaagacttataaggaaacccgtacctggttacatttgatcactaatttcaaccgtatttgggtcatgcatatttccatctattggatgtactgtgcttataatgcaccaaccttctacacccacaactatcaacaactggtcaacaataagcctttgggggcctataaatgggccaccgcggcattaggtggtactgtggcgtgcataattcagatcattgccactatatgtgaatggtcattcgttccaagaaaatgggctggtgctcaacatctatctcgtaggttctggttcttatgcgtcattcttgctatcaatctaggtccgcttatattcgttttcgcttacgataaagacaccgttaactccactgctgcacgtgttgtagctgccgttacatttttcattgccgttgctactgtcattttcttttccattatgccgttgggtgggttgtttacatcctatatgaagaaatctactagacgttatgtcgcatctcaaacttttactgctgcttttgctcctttgcatggcctagacagatggatgtcttatctagtctgggtcactgtttttgccgccaaatattcagaatcatatttctttttgattttatcattgagagatccaatgagaattttgtctaccacttcaatgagatgtacaggtgaacattggtggggcgacaagatttgtaaaatccaaccaaagattgtgctaggtttgatgattgccacagatttcatccttttcttcttggatacctacttatggtatatcattgtcaataccgttttctctgtcggtaaatctttctatttaggtatttctatcttaacaccatggagaaatatctttacgagattaccaaagagaatttactctaaaattttggctaccagcgatatggaaattaagtacaaaccaaaagttttaatttctcaagtttggaatgctgtcattatttccatgtacagagaacacttgttggcaattgatcatgtacaaaagttattgtatcatcaagttccatctgaaattgaaggtaaaagaactttgagagctccaaccttctttgtttctcaagatgacaacaatttcgaaaccgaatttttccccagagactcagaagctgaacgtcgtatttcatttttcgctcagtctctgtctacaccaattcccgaaccactaccagttgacaacatgccaactttcactgtgttaactcctcactacgccgaaagaattttattgtctttgagagaaattattcgtgaagatgatcaattctccagagtcactctattggaatacttaaaacagttacatcccgttgaatgggagtgctttgtcaaggataccaagattttggctgaggaaactgctgcatatgaaggaaatgaagatgatcccgaaaaagatgacgctttgaaatcccaaatcgatgatttgcccttttactgtattggtttcaaatctgctgcaccagaatatactttgcgtaccagaatttgggcttctttgagatcccaaactttgtaccgtaccgtttccggtttcatgaattactctagagccatcaaattgttataccgtgttgaaaatcctgaaattgttcaaatgtttggtggaaacgctgaaggtttggaaagagaattggaaaaaatggccagaagaaagttcaagtttttggtttctatgcaaagattggctaagttcaaacctcacgaattagaaaatgctgaatttttgttgagagcttacccagatttgcaaattgcttacttggacgaagaacctccattgaatgaaggtgaagaaccaagaatttactcttctctaatcgatggtcactgtgaaattttagacaatggtcgcagacgtcctaagtacagagttcaattatctggtaacccaattcttggtgatggtaagtctgataaccaaaatcatgctttaattttctacagaggtgaatatcttcaattaattgattctaaccaagacaactatttggaggaatgtttgaagatcagatccgttttggctgaatttgaagagttgaatgtcgaacaagttaacccatacgcccctggtttgaagtatcaagaccaatcaaacaatcatcctgttgctatcgtgggtgcaagagaatacattttctctgaaaactctggtgtcttgggtgatgttgctgctggtaaagaacagacttttggtacattatttgctcgtactttatctcaaattggtggtaaattgcattatggtcatcctgatttcatcaatgctacattcatgactacaagaggtggtgtttctaaagcacaaaaaggtttacatttaaatgaagatatttatgctggtatgaatgctttgcttcgtggtggtcgtattaagcattgtgaatattatcaatgtggtaaaggtagagatttgggtttcggtactattttgaatttcaccacaaagattggtgccggtatgggtgaacaaatgttatctcgtgaatactactacttgggtactcaattacctgttgatcgtttcttaacattctattatgcgcatccaggtttccatttgaacaacttgttcattcaattatcgttacagatgtttatgctaactttggtgaacctgcatgctttagcccatgaatccatcctgtgtatctataatagaaacacaccaatcacagatgttttgtatccaatcggatgttataactttcatcctgcaattgattgggtgagacgttatacattatctattttcattgttttctggattgcctttgtccccattgtcgtccaagaactgatcgaacgtggtctgtggaaagccactcaaagatttttccgtcatattctatctttgtcaccaatgttcgaagtgttcgccggtcaaatctattcttctgcactcctaagtgatttagcggttgggggagctcgttacatttcaacaggtcgtggtttcgctacgtcacgtatccctttctccatcctttactcgagattcgctggttcagctatttatatgggctcaagatcaatgttaatgttattatttggtactgttgcgcattggcaagctccattgttgtggttttgggcatctctatcttccttgatttttgcgcctttcgttttcaatccacatcaatttgcttgggaagattttttcttagattacagagatttcatcagatggctatcaagaggtaataataagtatcacaggaactcatggattggttatgtgaggatgtcaaggtcccgtatcactgggttcaaacgtaaaatggttggcgatgaatctgagaagtctgcgggcgatgcaagcagagctcatagaactaatttgatcacggctgagattataccgtgcgcaatttatgcagcaggttgttttatcgcctttacatttattaatgctcaaactggtgtcaaaactacagataatgataaagtgaactccgctttacgtgttatcatttgtactttggctccaatcgtcattgatattgctattcttttcctatgccttggcctttcttgttgttctgggccattattcggtatgtgctgtaagaaaacaggttctgtcatggcaggttttgctcacggtgttgctgttgttgtccacattctcttctttattgtcatgtgggttttggaaggtttcagttttgtcagaatgttgattggtgttgttacatgcatacaatgtcaaagactcattttccactgtatgaccgtattactgttgactcgtgaattcaaaaatgatcacgctaataccgcattttggaccggtaatggtattctactggtttag

SEQ ID NO: 137 - DNA, 5154 bp, Saccharomyces pastorianus; identical to SEQ ID NO: 136

SEQ ID NO: 138 - DNA, 5154 bp, Saccharomyces pastorianus; identical to SEQ ID NO: 136

SEQ ID NO: 139 - DNA, 5154 bp, Saccharomyces pastorianus; identical to SEQ ID NO: 136

SEQ ID NO: 140 - DNA, 5154 bp, Saccharomyces pastorianus; identical to SEQ ID NO: 136

SEQ ID NO: 141 - DNA, 5631 bp, Unknown
  Unclassified
atgaacactgatcaacaaccttatcagggccaaacggactatacccagggaccaggtaacgggcaaagtcaggaacaagactatgaccaatatggccagcctttgtatccttcacaagctgatggttactacgatccaaatgtcgctgctggtactgaagctgatatgtatggtcaacaaccaccaaacgagtcttacgaccaagactacacaaacggtgaatactatggtcaaccgccaaatatggctgctcaagacggtgaaaacttctcggattttagcagttacggccctcctggaacacctggatatgatagctatggtggtcagtataccgcttctcaaatgagttatggagaaccaaattcgtcgggtacctcgactccaatttacggtaattatgacccaaatgctatcgctatggctttgccaaatgaaccttatcccgcttggactgctgactctcaatctcccgtttcgatcgagcaaatcgaagatatctttattgatttgaccaacagactcgggttccaaagagactccatgagaaatatgtttgatcattttatggttctcttggactctaggtcctcgagaatgtctcctgatcaagctttactatctttacatgccgactacattggtggcgatactgctaactataaaaaatggtattttgctgctcagttagatatggatgatgaaattggttttagaaatatgagtcttggaaaactctcaaggaaggcaagaaaagctaagaagaaaaacaagaaagcaatggaagaggccaatcccgaagacactgaagaaactttaaacaaaattgaaggcgacaactccctagaggctgctgattttagatggaaggccaagatgaaccagttgtctcccctggaaagagttcgtcatatcgccttatatctgttatgttggggtgaagctaatcaagtcagattcactgctgaatgtttatgttttatctacaagtgtgctcttgactacttggattcccctctttgccaacaacgccaagaacctatgccagaaggtgatttcttgaatagagtcattacgccaatttatcatttcatcagaaatcaagtttatgaaattgttgatggtcgttttgtcaagcgtgaaagagatcataacaaaattgtcggttatgatgatttaaaccaattgttctggtatccagaaggtattgcaaagattgttcttgaagatggaacaaaattgatagaactcccattggaagaacgttatttaagattaggcgatgtcgtctgggatgatgtattcttcaaaacatataaagagacccgtacttggttacatttggtcaccaacttcaaccgtatttgggttatgcatatctccattttttggatgtactttgcatataattcaccaacattttacactcataactatcaacaattggtcgacaaccaacctttggctgcttacaagtgggcatcttgcgcattaggtggtactgtcgcaagtttgattcaaattgtcgctactttgtgtgaatggtcattcgttccaagaaaatgggctggtgctcaacatctatctcgtagattctggtttttatgcatcatctttggtattaatttgggtcctattatttttgtttttgcttacgacaaagatacagtctactccactgctgcacacgttgttgctgctgttatgttctttgttgcggttgctaccatcatattcttctccattatgccattgggggggttgtttacgtcatatatgaaaaaatctacaaggcgttatgttgcatctcaaacattcactgctgcatttgcccctctacatgggttagatagatggatgtcctatttagtttgggttactgtttttgctgccaaatattcagaatcgtactactttttagttttatctttgagagatccaattagaattttgtccaccactgcaatgaggtgtacaggtgaatactggtggggtgcggtactttgtaaagtgcaacccaagattgtcttaggtttggttatcgctaccgacttcattcttttcttcttggatacctacttatggtacattattgtgaataccattttctctgttgggaaatctttctatttaggtatttctatcttaacaccatggagaaatatcttcacaagattgccaaaaagaatatactccaagattttggctactactgatatggaaattaaatacaaaccaaaggttttgatttctcaagtatggaatgccatcattatttcaatgtacagagaacatctcttagccatcgaccatgtacaaaaattactatatcatcaagttccatctgaaatcgaaggtaaaagaactttgagagctcctaccttctttgtttctcaagatgacaataattttgagactgaatttttccctagggattcagaggctgagcgtcgtatttctttctttgctcaatctttgtctactccaattcccgaaccacttccagttgataacatgccaacgttcacagtattgactcctcactacgcggaaagaattctgctgtcattaagagaaattattcgtgaagatgaccaattttctagagttactcttttagaatatctaaaacaattacatcccgttgaatgggaatgttttgttaaggatactaagattttggctgaagaaaccgctgcctatgaaggaaatgaaaatgaagctgaaaaggaagatgctttgaaatctcaaatcgatgatttgccattttattgtattggttttaaatctgctgctccagaatatacacttcgtacgagaatttgggcttctttgaggtcgcagactctatatcgtaccatttcagggttcatgaattattcaagagctatcaaattactgtatcgtgtggaaaatcctgaaattgttcaaatgtttggtggtaatgctgaaggcttagaaagagagctagaaaagatggcaagaagaaagtttaaatttttggtctctatgcagagattggctaaattcaaaccacatgaactggaaaatgctgagtttttgttgagagcttacccagacttacaaattgcctacttggatgaagagccacctttgactgaaggtgaggagccaagaatctattccgctttgattgatggacattgtgaaattctagataatggtcgtagacgtcccaagtttagagttcaattatctggtaacccaattcttggtgacggtaaatctgataaccaaaaccatgctttgattttttacagaggtgaatacattcaattaattgatgccaaccaagataactacttggaagaatgtctgaagattagatctgtattggctgaatttgaggaattgaacgttgaacaagttaatccatatgctcccggtttaaggtatgaggagcaaacaactaatcatcctgttgctattgttggtgccagagaatacattttctctgaaaactctggtgtgctgggtgatgtggccgctggtaaagaacaaacttttggtacattatttgcgcgtactttatctcaaattggtggtaaattgcattatggtcatccggatttcattaatgctacgtttatgaccactagaggtggtgtttccaaagcacaaaagggtttgcatttaaacgaagatatttatgctggtatgaatgctatgcttcgtggtggtcgtatcaagcattgtgagtattatcaatgtggtaaaggtagagatttgggtttcggtacaattctaaatttcactactaagattggtgctggtatgggtgaacaaatgttatctcgtgaatattattatctgggtacccaattaccagtggaccgtttcctaacattctattatgcccatcctggtttccatttgaacaacttgttcattcaattatctttgcaaatgtttatgttgactttggtgaatttatcttccttggcccatgaatctattatgtgtatttacgataggaacaaaccaaaaacagatgttttggttccaattgggtgttacaacttccaacctgcggttgattgggtgagacgttatacattgtctattttcattgttttctggattgccttcgttcctattgttgttcaagaactaattgaacgtggtctatggaaagccacccaaagatttttctgccacctattatcattatcccctatgttcgaagtgtttgcgggccaaatctactcttctgcgttattaagtgatttagcaattggtggtgctcgttatatatccaccggtcgtggttttgcaacttctcgtataccattttcaattttgtattcaagatttgcaggatctgctatctacatgggtgcaagatcaatgttaatgttgctgttcggtactgtcgcacattggcaagctccactactgtggttttgggcctctctatcttcattaatttttgcgcctttcgttttcaatccacatcagtttgcttgggaagatttctttttggattacagggattatatcagatggttatcaagaggtaataatcaatatcatagaaactcgtggattggttacgtgaggatgtctagggcacgtattactgggtttaaacgtaaactggttggcgatgaatctgagaaagctgctggtgacgcaagcagggctcatagaaccaatttgatcatggctgaaatcataccctgtgcaatttatgcagctggttgttttattgccttcacgtttattaatgctcaaaccggtgtcaagactactgatgatgatagggtgaattctgttttacgtatcatcatttgtaccttggcgccaatcgccgttaacctcggtgttctattcttctgtatgggtatgtcatgctgctctggtcccttatttggtatgtgttgtaagaagacaggttctgtaatggctggaattgcccacggtgttgctgttattgtccacattgcctttttcattgtcatgtgggttttggagagcttcaactttgttagaatgttaatcggagtcgttacttgtatccaatgtcaaagactcatttttcattgcatgacagcgttaatgttgactcgtgaatttaaaaacgatcatgccaatacagccttctggactggtaagtggtatggtaaaggtatgggttacatggcttggacccagccaagtagagaattaaccgccaaggtaattgagctttcagaatttgcagctgattttgttctaggtcatgtgattttaatctgtcaactgccactcattataatcccaaaaatagataaattccactcgattatgctattctggctaaagccctctcgtcaaattcgtcccccaatttactctctgaagcaaactcgtttgcgtaagcgtatggtcaagaagtactgctctttgtactttttagtattggctatttttgcaggatgcattattggtcctgctgtagcctctgctaagatccacaaacacattggagattcattggatggcgttgttcacaatctattccaaccaataaatacaaccaataatgacactggttcccaaatgtcaacttatcaaagtcactactatactcatacgccatcattaaagacctggtcaactataaaataa

SEQ ID NO: 142 - DNA, 1078174 bp, Saccharomyces cerevisiae
cacacacacacaccacccacacaccacaccacacaccacaccacacaccacaccacacccacacacccacacacacttttcacatctacctctactctcgctgtcataccttacccggctttctgaccgaaattaaaaaaaaaatgaaaatgaaaccctgttctttagccctacagcacttctacatagccctaaatagccctaaatagccctcatgtacgtctcctccaagccctgttgtctcttacccggatgttcaaccaaaagctacttactacctttattttatgtttactttttatagattgtctttttatcctactctttcccacttgtctctcgctactgccgtgcaacaaacactaaatcaaaacagtgaaatactactacatcaaaacgcatattccctagaaaaaaaaatttcttacaatatactatactacacaatacataatcactgactttcgtaacaacaatttccttcactctccaacttctctgctcgaatctctacatagtaatattatatcaaatctaccgtctggaacatcattcgctatccagctctttgtgaaccgctaccatcagcatggtaccctcgtgttatctgcagcgagaacttcaacgtttgccaaatcaacccaatgtggtaacaaccacacctccgaaatctgctccaaaagatattccagtttctgccgaaatgttttattgtagaacagccctatcagcatcgacaggaatgccgtccaatgcggcactttagatggggtaactcccagcgcaagctgatctcgcaagtgcattcctagacttaattcatatctgctcctcaactgtcgatgatgcctgctaaactgcagcttgacgtactgcggaccctgcagtccagcgctcgtcatggaacgcaaacgctgaaaaactccaactttctcgagcgcttccacaaagaccgtatcgtcttttgcctcccattcttcccggcactttttctcgtcccagttcaaaaagtactgcagcacctctgtcttcgattcacgcaagttgctccatactttataatacaactctttgatctgccttccagacatgcggaaaacttggctcccttgcttgcctcttgtcgaatccaatacactaattgtttctcttcttctagtaatggccaggtaccaagcataatttctctgtatctgagagtagatctctcccctttttacgctaaaaaatttcaaataccctacagggtccccatgatatggctcgatgtcttccaagtattctttgtattcctcgtcatttcgcagcattctctccacagctagtgcttcccaagccatcctccgatacgatactttctggccagcccaacagacacagagctcgaacatcttttgacagcccttgcataatccgtattgtgtgaatactccctctgggcagaagtatacgtcaataccatagaggaaaagatgtttaatttcgtcagaccgaaatccaagaaactgtaagacattcatattctcggaagtattgggaaattgtgctttcagtttctttctctctagcaaaaccatttgactccctttccgcttatacgactctttgttaatgtcggtgactggatggaatctattatcctcagcattgccatctttattggcgtcctccttggcactagcgttggtactttcagtggtagtagcattagtgctggagttggtgctagcagtggtagtagcactagtgttggagttggtaccttcagtggtagtagcattagtgctggagttggtactttcagtggtagtagcattagtgttggagttggtactttcagtggtagtcgcactagtcctgacgttgatgctggcagtggtagtagcattagtgctggagtcggtactttcagtggtagtagcactagtgttggagtcggtactttcggtggtagtagcactagtgttggagttggtactttcagtggtagtcgcactagtcctgacgttgatgctggcagtggtagtagcactagtcctgacgttggtgctggcagtggtagtagcattagtgctggagttggtactttcagtggtagtcgcactagtcctgacgttgatgctggcagtggtagtagcactagtcctgacgttggtgctggcagtggtagtagcattagtgctggagttggtagtcgcattggtactggcattagcactaccatgaatgcacgtgttgctgtcctcatcactgctgcaatactttctgcacctgtcactgctattgctctcctggaagctagacggtaacgcaacgatcgacatggaagctgtcgcctgtttttcagccaatctgtccattctttctatcagttccactgtgtcagcagacaggtctgtcctggagccacagcatccaacatgctggcccttttttcctttctttgattcaagtccatagaactcgcgtacctgttcggttatacagccttccttaatcggtggtaattcacccttacgattccttgccgcccaactgttttttctagataatagataacagaggcccccatctcttagtctccctacgccttgaatgagctcaataatattaagtctattatcaagcatgatcaccatcatcaattgcttaatgtcaattccttcagtcactaatttcgttccgatgagaactcgcatgctaccgtcagtgacaaactcctttgtgcgagacaccttttctgcagcacccagcttcccgtgtatccataccaccctaaaatactttctccaagagcaggccaattcttccacttcgttggttgtgcttgcaactacaatggccttcgactctggttcaatttcaaagagggctaaaagaagcttcagtgcttcttcgggctgtgattccactttcttccaaattttatgaacatgccctaaaggcacctcggatttctccttgattagattaaacatccgtgttggatagctggatagacctctgctgagatcttccgaccgtttgagctcgttgatgtccatcgacttcttggccagtcccgtaagcccaatacgctgcaacgcagcatcagctacagcctcaggtgctgtgccgctcaaaaagattgctttctcaaaagcgtcaaaatcaaggttagttatgcccccaaattgcgactgccggtagacctccgtttcaaagttgtgaaactcatctacaatgaggtaacccaattttacgttgttggtcctaaaggtgcactcaacaatattctcccacgcagctatcctgtctgtgaaattagtgctagcaagatcatcgtagatccccacgtataaatcagtaacgccatcgcaaccttcttcaataaagtttcttacaggggccacattcaagcaaccgcatcggcccaacctgatcatgcaattagcaagcaacactgtgtacggtacaaacagaaacgacacatatttcacgtcgcccttagacgccagtgctatcaaggggagatgaaataactccgtcttaccatagcccggtggggcctgtactgccacagagggtgtgtctgccatgtatatttcatgacataagcgcaactgatgcaagtccctgaattcaaaggagctgccaaagagtttctggcctgcgacgaggatatcgtttgtactcttgggctctcggggcctttttcgcgttactcttgaaattttttgatcatgatctgaactcgccgcctcacctgccactacgtcttccgcattccgagtactagagaatgaacaatggtagtcgctttcaaggcctaaccattgaatccagcgctcggaagtgagtccgtcaagcgtctttagtcgaggctccgatgaaccgttcttgttgtatcgtcgacgtatacgttgcgctgtagctctggataacggtaagcgtatcaccgtaagctcgtcaattatttttgagagccgcggtcattttgttagtatctcttctcaacttgggcagcacacatgcaaaacatcacccaatcggtcctttttgttcatcatatcgttacatatctgtgaaaagtactttatctcaatgggtttacgtgggcatagatcacgcttcagccgctctgtgtcgactttcttttcgccaggtaaacttgcttggtatgcagaaaaaatcgatagctcatctacgtgtagtaacaaaaacatgtggggtgccaaattgtacccatatctccttatggtgcttttctgaagactccttacaataggtgcgccagaaacaaagtcagtgaaagtacgcatcgtagagctgtcgttcggcctggcactcgctatttcgtgacaacgttccaggacacggaaactcaactcattatagtatcctctgttgaggtaaaaaagagaaagggtatcgtaatcctttctattgaatttcaaagtatgcacttgaaacaacgtgtagaccatcaagttgattttcttgggaataagatactttgaagggattggtccgccctggaaatctggttcgtcttcaacaaacgtcaggaacttttgtacatttttcccgaccatgacggaaacgacaattttttcaaaagaccttttcctatccattgcaccagttctgaattttaccactttgattaggccagacttttcgtcttcgtagaatgaccgcacttccgtggggatcgattcaaataaagttattgagggacaatgtaccaagtcgtttttgttatttagagccgactcaaactcgtcaaagtttgctttttcaaacttacgcctatcggaaactttcattttatttttgtaagtttcgaaattaacaatagtatgttgattgttatgctttttgacaagaaatccatcaatataaacaaaagattgtccagtttccgtcttatcatcatctaagaatgtaataattaagctactctattgagaagaagcagaatctgcgctatgcaggtgcaaatctccagcagcagcaaagaaaattcagttaataagaaatctcactaagataagcgactgtctgtcccaacatagaaaacagaaggatgtctcattcatccttgatttccggcctgcaaaaataaagtagtcggtacgtacgttcgttttcaatttccatggtgcacagtatcttaactatctgcttagtcgaggagaaccaggattctgttcgttgctcagccgcttcgtggatattctcttggatactttaaatatggacctacgcttagcctgcgcttagcctacaacttcttccgctctcgaaaagaccaatataatagaaagttataaattacatttccttattaggtatacgacctcgcgcttcgaagtagaggagccctttttggcgtacctacatatggcgcgtcagacagacaaacttcccccaaaaatgtattaccctgccgaataagaaaacagacccattcacccacgacgtatcaagttacttccttggtgcaatgtcccactataaaaaaattccttgacgctagatcgttggactaaaatctgcgtcacaatcgcctaaacaggaaatattgcctattttcgtacaaggttacttcctagatgctatatgtccctacggccttgtctaacaccatccagcatgcaatacagtgacatatatatacaccacacccacacaccacacccacaccacacccacacccacacacaccacacacccacacactctcttacatctacctttactctcgctgtcacaccttacccggctttctgaccgaaattaaaaaaaatgaaaatgaaaccctcttctttagccctacaacacttttacatagccctaagtagccctcatgtacgtctcctccaagccctgttgtctcttacccggatgttcaaccaaaagctacttactacctttattttatgtttactttttatagattgtctttttatcctactctttcccacttgtctctcgctactgccgtgcaacaaacactaaatcaaaacagtgaaatactactacatcaaaacgcatattccctagaaaaaaaaatttcttacaatatactatactacacaatacataatcactgactttcgtaacaacaatttccttcactctccaacttctctgctcgaatctctacatagtaatattatatcaaatctaccgtctggaacatcatcgctatccagctctttgtgaaccgctaccatcagcatgtacagcggtaccctcgtgttatctgcagcgagaacttcaacgtttgccaaatcaacccaatgtggtaacaaccacacctccgaaatctgctccaaaagatattccagtttctgccgaaatgttttattgtagaacagccctatcagcatcgacaggaatgccgtccaatgcggcactttagatggggtaactcccagcgcaagctgatctcgcaagtgcattcctagacttaattcatatctgctcctcaactgtcgatgatgcctgctaaactgcagcttgacgtactgcggaccctgcagtccagcgctcgtcatggaacgcaaacgctgaaaaactccaactttctcgagcgcttccacaaagaccgtatcgtcttttgcctcccattcttcccggcactttttctcgtcccagttcaaaaagtactgcagcacctctgtcttcgattcacgcaagttgctccatactttataatacaactctttgatctgccttccagacatgcggaaaacttggctcccttgcttgcctcttgtcgaatccaatacactaattgtttctcttcttctagtaatggccaggtaccaagcataatttctctgtatctgagagtagatctctcccctttttacgctaaaaaatttcaaataccctacagggtccccatgatatggctcgatgtcttccaagtattctttgtattcctcgtcatttcgcagcattctctccacagctagtgcttcccaagccatcctccgatacgatactttctggccagcccaacagacacagagcccgaacatcttttgacagcccttgcataatccgtattgtgtgaatactccctctgggcagaagtatatgtcaataccatagaggaaaagatgtttaatttcgtcagaccgaaatccaagaaactgtaagacattcatattctcggaagtattgggaaattgtgctttcagtttctttctctctagcaaaaccatttgactccctttccgcttatacgactctttgttaatgtcggtgactggatggaatctattatcctcagcattgccatctttattggcgtcctccttggcactagcgttggtactttcagtggtagtggcattagtgctggagttggtgctagcagtggtagtggcattagtgctggagttggtgctagcagtggtagtagcactagtgttggagtcggtactttcggtggtagtagcactagtgttggagtcggtactttcggtggtagtagcactagtgttggagttggtactttcagtggtagtcgcactagtcctgacgttgatgctggcagtggtagtagcactagtcctgacgttggtgctggcagtggtagtagcattagtgctggagttggtactttcagtggtagtcgcactagtcctgacgttgatgctggcagtggtagtagcactagtcctgacgttggtgctggcagtggtagtagcattagtgctggagttggtagtcgcattggtactggcattagcactaccatgaatgcacgtgttgctgtcctcatcactgctgcaatactttctgcacctgtcactgctattgctctcctggaagctagacggtaacgcaacgatcgacatggaagctgtcgcctgtttttcagccaatctgtccattctttctatcagttccactgtgtcagcagacaggtctgtcctggagccacagcatccaacatgctggcccttttttcctttctttgattcaagtccatagaactcgcgtacctgttcggttatacagccttccttaatcggtggtaattcacccttacgattccttgccgcccaactgttttttctagataatagataacagaggcccccatctcttagtctccctacgccttgaatgagctcaataatattaagtctattatcaagcatgatcaccatcatcaattgcttaatgtcaattccttcagtcactaatttcgttccgatgagaactcgcatgctaccgtcagtgacaaactcctttgtgcgagacaccttttctgcagcacccagcttcccgtgtatccataccaccctaaaatactttctccaagagcaggccaattcttccacttcgttggttgtgcttgcaactacaatggccttcgactctggttcaatttcaaagagggctaaaagaagcttcagtgcttcttcgggctgtgattccactttcttccaaattttatgaacatgccctaaaggcacctcggatttctccttgattagattaaacatccgtgttggatagctggatagacctctgctgagatcttccgaccgtttgagctcgttgatgtccatcgacttcttggccagtcccgtaagcccaatacgctgcaacgcagcatcagctacagcctcaggtgctgtgccgctcaaaaagattgctttctcaaaagcgtcaaaatcaaggttagttatgcccccaaattgcgactgccggtagacctccgtttcaaagttgtgaaactcatctacaatgaggtaacccaattttacgttgttggtcctaaaggtgcactcaacaatattctcccacgcagctatcctgtctgtgaaattagtgctagcaagatcatcgtagatccccacgtataaatcagtaacgccatcgcaaccttcttcaataaagtttcttacaggggccacattcaagcaaccgcatcggcccaacctgatcatgcaattagcaagcaacactgtgtacggtacaaacagaaacgacacatatttcacgtcgcccttagacgccagtgctatcaaggggagatgaaataactccgtcttaccatagcccggtggggcctgtactgccacagagggtgtgtctgccatgtatatttcatgacataagcgcaactgatgcaagtccctgaattcaaaggagctgccaaagagtttctggcctgcgacgaggatatcgtttgtactcttgggctctcggggcctttttcgcgttactcttgaaattttttgatcatgatctgaactcgccgcctcacctgccactacgtcttccgcattccgagtactagagaatgaacaatggtagtcgctttcaaggcctaaccattgaatccagcgctcggaagtgagtccgtcaagcgtctttagtcgaggctccgatgaaccgttcttgttgtatcgtcgacgtatacgttgcgctgtagctctggataacggtaagcgtatcaccgtaagctcgtcaattatttttgagagccgcggtcattttgttagtatctcttctcaacttgggcagcacacatgcaaaacatcacccaatcggtcctttttgttcatcatatcgttacatatctgtgaaaagtactttatctcaatgggtttacgtgggcatagatcacgcttcagccgctctgtgtcgactttcttttcgccaggtaaacttgcttggtatgcagaaaaaatcgatagctcatctacgtgtagtaacaaaaacatgtggggtgccaaattgtacccatatctccttatggtgcttttctgaagactccttacaataggtgcgccagaaacaaagtcagtgaaagtacgcatcgtagagctgtcgttcggcctggcactcgctatttcgtgacaacgttccaggacacggaaactcaactcattatagtatcctctgttgaggtaaaaaagagaaagggtatcgtaatcctttctattgaatttcaaagtatgcacttgaaacaacgtgtagaccatcaagttgattttcttgggaataagatactttgaagggattggtccgccctggaaatctggttcgtcttcaacaaacgtcaggaacttttgtacatttttcccgaccatgacggaaacgacaattttttcaaaagaccttttcctatccattgcaccagttctgaattttaccactttgattaggccagacttttcgtcttcgtagaatgaccgcacttccgtggggatcgattcaaataaagttattgagggacaatgtaccaagtcgtttttgttatttagagccgactcaaactcgtcaaagtttgctttttcaaacttacgcctatcggaaactttcattttatttttgtaagtttcgaaattaacaatagtatgttgattgttatgctttttgacaagaaatccatcaatataaacaaaagattgtccagtttccgtcttatcatcatctaagaatgtaataattaagctactctattgagaagaagcagaatctgcgctatgcaggtgcaaatctccagcagcagcaaagaaaattcagttaataagaaatctcactaagataagcgactgtctgtcccaacatagaaaacagaaggatgtctcattcatccttgatttccggcctgcaaaaataaagtagtcggtacgtacgttcgttttcaatttccatggtgcacagtatcttaactatctgcttagtcgaggagaaccaggattctgttcgttgctcagccgcttcgtggatattctcttggatactttaaatatggacctacgcttagcctgcgcttagcctacaacttcttccgctctcgaaaagaccaatataatagaaagttataaattacatttccttattaggtatacgacctcgcgcttcgaagtagaggagccctttttggcgtacctacatatggcgcgtcagacagacaaacttcccccaaaaatgtattaccctgccgaataagaaaacagacccattcacccacgacgtatcaagttacttccttggtgcaatgtcccactataaaaaaattccttgacgctagatcgttggactaaaatctgcgtcacaatcgcctaaacaggaaatattgcctattttcgtacaaggttacttcctagatgctatatgtccctacggccttgtctaacaccatccagcatgcaatacagtgacatatatatacaccacacccacacaccacacccacacacacacacccacacccacacccacacacacacacccacacacaccacacccacacaccacacccacacccacaccacacccacacacccacacccacacacccacaccacacccacacccacacacacccacacagtacctcaacacaacccctaatccaaccctgatgaacctgcctccaaacctaccctccattaccctacctctccactcgttaccctgtctcattcaaccgtaccactcccaaccaccatccatctctctacttaccactaaccaccgtccaccataaccgttaccctccaattacccatatccaactccactaccgcttaccctaccatcgacgatgtcctactcactgtactgttgttcacccaccatattgaaacgtctacaaatgatcgtaaataatacacatatacttatcctaccactctaatcccactaccacatgccatactcaccttcacttgtatactgatatggcatatgcacacggatgctacagtatataccactctcaaacttaccctactctcacattccactccatcacccatctctcaccatcagtaccaaatgcactcgcatcattatgcacggcacttgcctcagcggtttataccctgtgccatttacccataaagtccatcattatccacattttaatatctatatctcattcggcgaccccaaatattgtataactgcccttaatacatacgttataccacttttgcaccatatactaaccactcaatttatacacacttatttcaatatacccacaaaatcaccaccaaaatcacctaaacataaaaattatttatctttcaactttacgaaataaacatattgacttgaagtatgagcactaccataacgtcattaacgtaaaagttccttaatattaccatttgcttgaacggatgccatttcagaatatttctaactttcacagaccatacattagaataatatgccacctcactgtcgtaacactctatattcaccgagaaacaatacggtagtggctcaaactcatgccggcgctatgataaaattgtatcctatttccattcccatatgctaaccgcaatatcctaaaaggataactgatgcatctttaatcttgtatgtgacactactcatacgaagagactatatctaaagaagacgatacggtgataggtttgttgtttttgtaggagtcaacgaaacgccaaataattctacggtaatataacttatcagcgccgtatactaaaacggacgttacgatattgtctcacttcatcttaccaccctctatcttattgttgataaaacactaacccctcagctttatttctagttacagttacacaaaaactatcgcaacccagaaattttgatattttaagtgtcaaaaatgagggtctctaaatgagagtctggtaccatgacttgtaactcgcactgccctgatctgcaatcttgttcttagaagtgacgcatattctatacggcccgacgcgacgcgccaaaaaatgaaaaaagaagcagcgactcatttttatggaaggacaaagtgctgcgaagtcatacgcttccaatttcattgttgtttattgggcatactctgttagctttatttccgtccacgctttttctacaatagtgtaaaagtttctttcttatgtttatcgtattcatgaaatacttcacgaacaccgtcattgatcaaataggtctataatattaatatacatttatataatcaacggtatttatatcatcaaaaaaagtagtttcttattttattttttcattacttttcactgtctatggattttcattcgtaaaggcatcactccctagtttgcgatagtgtagataccgtccttggatagagccttggagatagctggctttaatctggtggagtaccatgggacaccggttatcattctggtcacttggtctggggcaataccagtcaacatggtggtgaagtcaccgtagttgaaaacggcttcagcaacttcgactgggtaggtttcagttgggtgggcggcttggaacatgtagtattgggccaagtgagctctgatatcagagacgtagacacccaattcaaccaagttgactctttcgtcagattgagctagagtggtggttgcggaagcagtagcagcgatggcggcaacaccagcagcgattgaagttaatttgaccattgtatttgttttgtttgttagtgctgatgtaatcttaacaagaaatagtgaaatgaaagcgcatacctcaaaggcatatagttgaagcagctctatttatacccgttcctccatctgtcatcactacttaaacgattcgttaacagacgctcatttagcacctcacatattctccatatctcatctttcacacaatctcattatctctatggagatgctcttgtttctgaacgaatcgtacatctttcataggtttcgtatgtggagtattgttttatggcactcatgtgtattcgtatgcgcagaatgtgggaatgccaattataggggtgccggggtgccttgaaaaacccttttgcgcgcgcctgtgacatttcctttttcggtcaaaaagaatatccgaattttagatttggaccctcgtacagaagcttattgttaaagcccatactcagtctgttctaaacggcttccatggaagaaaaataactatattatagctttcctaaaagtttaattaagaatagcagacatgtgttgggagtcgtatattgttagaatctgtagttttaggtgttctcagtaaattcattgaaacaattgcgtacttgtaggcttctgagaagcagatagtagtcaaatagttgatatctaaagagctgccgaagggggtttctgtatccgcgtaagtaattttttgaaattttaatgtgatttttggcggaatggtgtgagtggttcacttctcatcttcaatttcatcgtcttatatttcgataataaaacaatacagtgagcgttgttattaagtaaatcataggcacttggtatcatataattcaaaatcaagtagttgtagtagtgcgtgtgtgcgtgttagtaattgttgatggcctagttcatctccttattgaaaaatgataaacaggtggcagtttcaattgtagtaaatatttattcatttttttattattgctaacgtatctgaaggctacgatgtaacgcagctcatctcttttaaacataaaagtcatttgtgtaatgtagagatttacaaagattttaaaaaaataacaaaactatacaaaactatctatatttgaatacttcctactatttttttttttttaactataatgaatgaatgcatgccatattgacttacgtaacaaggtggcctattggtaatatattacatatcatcatcctatatgtgtagcataatttgtccattctttatccgcattcaggcactcccaatctttatctctaaggcaaagagcaaccaccatttcacctctggaggatctaggcataaaatatattaggctctcaagggaaatgaagcgcggccgtcgtacactcttgggcttcccaagccctagattgaaatcaacgtcatacaggctgacttttgcccacgaactgaccataattccagataaagtatcaattggttgaggtatagaaaccttagtcttgtccgggcatcggctaaggagcgtagcaagtgcgcatgtattataggccaaatcgaagactttagggtctagcttcctgcgaatctgtgatgcaagaacgcccaaacttttatgatccaagcttttcagggaacctgtattaaaggtcatgttgactaataaccctggatacgtttcggggagtcctagccgttttctaacatccacagcacgccctaaatttgatttcgtttctggtttaagtcgagataaacgggctcgagaaactgatttccagatgaaagcagtgacgatatcatcagtggagacaaattttgtgccagaagtacatgtctgcattgccaaaatcctcagattctgcaatgagatagcagaaaattcaacataagcccaagtagagttcgaagaacaagactgttccttttcctctccacttgtatttctagaggtttccactatttcatgaactagcgtggtgtcgggttcccaagtttcatcaaacaaaggaatagatttgcttttatctatatttccaatgagcagttcttcatcagagaaaggtttttggtggcaagatttattgagcaagttgatgatactttcctgtcctgttatatccataatattgtgctgcccgacaatagttaagacgaggccgccggagataaagtttgcttgaactgcaaatacaggcccactcttggcggccatacctatagtgtttccaggtggattgatagtcatgcaaggcgcaaaagtcttttcgtctaacatgtagataggaaagtcagctttttcaagcgaatccattgttggggcagacagatcttctcgaagatcttggacgataagtggaattttgtctgacgggacaattctgtaggtaccagtgttaccttcgtcagcaccttcatttacgacatttcctgctagccactggaaatttttagccaatgtttcaagtcctcttgttaaggtatttacgatatggtcatgagcagaaggatctggtacacggtagatagagcatatttgagtgtatagtttgtatagcgaaggttgttgtcccaaaatatcaagttgatcgttttctagcatctgtacactttttgtacgtttctgagagatgatcttgactctaaacatccatctaccttcaaagtgaaatttatagtcacgtccgtcattatgcacgtcttaaacattaaaatcttgataaatacactgtaaaagctttaacgttattggaatagaaactctcatcactcagagaccatcagttacctgcaaaacgtttcatatttgtatataaaccatgagattaagtggtctgaaattatgtatcattttttgcattctagcatgccacagcaagggggtacacgtattttttgatggtgaataagatagaaatgcataccgtgatacttcaagctggcactatctttatatcttcctccgtatatagcacttgaagctctgtatctagaatatcctctttagtccgggacgtgcctccaaatacttacggattggcgaaaaatatgcactgaaatgtgtgcaaattaaccaaaatagggcaggcagtaaaaagttctaatgatttttctatttgatcaagataaaataaccttctgctgaggaccgcacattgacgtatatacactgcttttagttttgtagatacaagatatttgttaaaagaaattgaattaggagtatttatctacagctgatgcaatttcggcgatatctttaggagacgttctacaacaaccgccaataatgcgcgcaccattatcaacgaatttcttaaccgtggtctcccagtcatccaacttattagtcggccggtgccatgtcttctctttgggattgtagatttctccactgtttgggtaaactagcagaggcatgccaggtagatgctcgtgcaacattttaagaattaatgccgattgattgaaactgacacagttaactcccattaataagagattcttgttaattttatttccgaggccttttatatggacagaaatttcttccaaagtggtaccgtctcgtagcaaactattgtcatccaccgacaacccaatataaaagggcttcgaaataatatcttcatcccaggataaaatagcctttaactcatgaaaatttggaatcgtttcaaaaccaataagatcaatatctctattttggttgaagttctccagctggggtttgaaaaagccgtagtaatcaatattctcaggatggggaccatagtcaccagtatattcacaggatacatgtgctgcccatgggccaatactcccgattaagtacctttcctcaccaataaattcacgagtaaatgacacgattttatcgagaaaacgcttgtaagcagccagagttttaatcgaggtattctcagatatgctttgaaagtttgcctggtaagtaattgtcattaatatgtttgcgccagcaatcataaagtctctgtacatttcttctaccacctttcgctcttgagaagatggctcccaaaaggattcgctcgtaaaaggagctgcagaccataccggactatttatgttaatgcctctgttttccaattctgtaccctgtccaccatcaaggataagaacttttccggggtgctcaactattagttctttgattggaatgcgcttcatctgttttttgattactttttcaagttgcacactaaaagttgctgattcagatttcttctacaacttgtctgtttaaattatcttccttagtagtacattttcaaattggcgttgttgctgttttgctattaccattgaatacctcgccacaatttggtagtactttcatgccacagtttttacttttccacagttcctgcaggaatggctttttttcattaactttttgcggggatagcgaagagatgccaggaaataaatgcgtatatattttacagatttgggtggttaagtaatcaccgtcaagagttctccatcaggataccatgaaagatacccgaaatggatgaatttgaatctaccaaactttcgaaggttcagttttccactagcgtgttaagtacgccttcgaatgaaggaaataatctaatacacagattcaagaactctttcaagcgaaatgattcaccagcgatccaagaaggtttgctgtattcggagctttcagaggaagaaaaaatacaatgggacttagccaaccagccgtataaaaaggtcctagatcaaagacacctgaccatgatagccattggaggtactctagggacgggtcttttcattggtttaggggaatcactagcgtccggacctgcttctttgctaattggtttcttgttggtcggcgcatctatgctctgtgttgttcagtgtggggccgaactttcatgtcagtaccctgtttccggctcctatgcgctgcacgccagtagatttatagacccatcagtcggcttcagtataggaattaactacttattgatgtggctcatatcttaccctagcgagctggtaggatgttcgcttaccatctcttattgggcaccatcggtcaatcctgctgcctgggttgcaatcgcgttcgttttaagcatgctattgaatctttttggggcaagaggctttgcagaatcagagttttatatgtcaattttcaaaattgtggctctattcatttttataattattggtattgttctcattgcaggtggtgggcctgattctactggatacatcggcacgaagtattggcacgatccaggctccttcgctgttcctgttttcaaaaacctctgcaatacttttgtttcggcagcatactcctttagtggtacagaaatggttgttttaaccagcactgaagcaaggagtgtttcctcagtctctcgggcagcgaaaggtacgttctggagaattatcatcttttatattgttacagtgattataattggttgcctggtcccttataatgatcctcgtctgattagcggttcatccagtgaggatattactgcttccccgtttgttattgccttgagcaatactggtgctatgggaacaagagtgtctcattttatgaatgcggtcatcttgatagccgtattttctgtttgcaattcctgcgtttacgcatcctctagattgattcagggtttggcgacagcaggccaacttccaaagatctgcgcttacatggacaggaatggtcggcctttagttggcatggctatatgtggcgcttttggattgttaggctttttggttgtttccaagaaccagggtacagttttcacatggttgtttgcgttgtgttccatttcatttttcacaacttggttctgtatttgcttctgtcaagtcagatttaggatggcaatgaaagctcaaggaaggtcaaaggatgacattatctatagatcgacattagggatatacggaggaattttcggctgtatcttaaatgttctattggtaattggagaaatatatgtatcggctgcacccgtgggtagtcccagttctgctgctaatttctttgaatattgtatgagtattcccataatgattgctgtatatattggccatagaatttaccgcagagactggagacactggtacatcaagcggatggatattgacctcgatagcggacattcgttagaggacttcgaagccaccaagcttgagagggatgaggataagaaatacgtttcctctaagccactttactataggatctatcggtttttctgttaacttagtgaagtacttcatttgaatattaattaataataattttatgagccgggaattttgcatctatattctaggtttctagcaaccgtagttttacgtaagatgtatttttttttgaatattccgttttagaatgatattctaggccctgtatattctccaataacagcggcacgtccaggttctgtgacaatgctaatatattccttttttttttttttttaacttagtatacgctgtattggaatcagtgatttcatctaagtttactaacgcttacacaattgtggaagaagaggatagaaacacctcagatccccttgttacggtaaaacccctattctatgcctcagtaataactagaaatagccgattatcattatgttaagcctgtcgatacgcattacagttcaaaaaaaaggcggacatcgtggttgatatttgtttgaggccttaaattttattgtattacatgtataaatagctaacaacatttgttcagttggtaccaatcacctttgttgctgggtatccgcacacattaacaagacaatggaaaagggagaaaactaacaatcttaaacgataaaaccggacgaaataacagctgttatttttcatgctagaactaatggcttgatagtatacttgtaccttgtatcttagtgcttgaacggatgattcccgtcgccccacacctatgcatacaagacgtcaatcttcctgtgattatattttgagtatggcgtagtaatcccatatttctcgttgggtggtgctgatatttgaaaattcatgacctgttctacatacggctgccattggtaggaccgcaatcacagtgtaattttgaagaacttacattgggccaatggatgagctgtgaccataatttattagttgtttgtgtcacaagctcagacttagaagttctctattgcaaacattatttcatgtttccttaaattttttttattgcaccaactttagtgaccccttgtgagctccaacatatttgaaatcttcttaaatttctagtcggcaagcagcaaagaatttcagtagtaatctctaccgcggcaatatcgatgcaaatgtaactacctgtaaggatattgtcttcagtggtttggtatggttttgtaccttactcaacatcacgaataaaaaggaaggaatacgaatcatgatattgatgtttaatctttcaccgtcaaacaattaacatatatagtatatatattcttttatagaatactgcttgagctatttttttacttgacagaatggcgccgcgaagaacccctaaattttgtagccctaatttcgatcagttatatatagctatggcaccctcttgaatagcttcatgattggatctttttatatagtttccacgtaccacgcaaaacttgtctcaagtagccactttacgaggattttgaacggatttctagcagtttcttcacgctggggcgctgttgcattctcttataccaagctcgaagcgcctcgcactcttccggcacttgtagttttacaattgcagcaaatattagaccagctattactgtgatgtcagccattgagaatgaatcaccagcaacatatgggcgttctctgagaacggtatcaaaataatgcattccatgtagggctttgtcgcgctggcgaagtccccactctttgttttggtaaagctcgacttcaggccccaatccaggtgtagcatggtgaaaataaacactaacagggtcgagcagttccaactctgcgcgtttgttcatcatgtggattacgcctttttccagcggtgttttgccggtaagagtgggtgtaccatcaagtgcatcaatgtattcagtaatggctgtgcattcagcgattaaagtcccgtcatcaagttcaagcactggcactgtgcctgaatagttcttggcaagaaattcaggcttcttgtgctctcccttccagaggttgatcctcacaaattgcacacttgatagcatgttcttctcagccaaggcaatgcggactcgggccggataaggccctgcgggtgtgtcatatattatcattttttgtttcatcttttcacctccattgtaaatcaggaaacctctgccattcatgtatcctttgtaggtactttatatagagcaccaagtttctatcctttagcaggaagcacattattaatcatttgagacgtaaacgaatgaattagtaagcagtgaaagaaattcgagcactaagcgcgacctaagggaacggacacggaacggagaaactgaagtatcaaatacttccatttgatcaaaccacttgtatccactccctgttttgcacacggtagtagaaggtcttttgaatatttactgtaaataccgatttctatgtccttcttgtccgattataggattcgggtcatttccagcgcctactttccttcttgatttcaaaatgtgtggttaacgtactcccaattgcactactgttcctacagttcacgcgcacctctttctgatgaaaatgcagctgcattaatctgcgatctattggcatctcgctcttgtatctgccctccattcgtgaaattttactctattaccatctttgatcatttttttgtcgcaaatgtgatacggcatccatcgaattttgctcgtaattgtttgccattatcgcccttttcattccgtattattcatccactccgcttcataatgggttccaaaaaaagaactattgtacgagcttttagactcacgaaaacattacttgaacaataattagcgcctgcagaacttgacataataaaattccattttcgatatctagctgtctgaagatatgatatctaagtaatacgggaaagtttccgctattattctctgttgcaagctcacgtgaaaatgtggattcgcgagtggggtgtaagtgaggattgccaagccttttgttcgaaaacttctgcaggaagcgttgtgttgcaaggatgatgcagcatgaaatatgtgttttctttttttcgaggttcactcctacaggtgattccttcgagaaattctgcaacccattgtgatatgatgcctggccgaaagatttcttcatttcttcggagcaggttcggcccgaaatcctcatgatcgagccgaatgccaagaagtaaaacaccaggatgactaaccagttattatcatgtgtatacagtactttggtacctttatcaagaagtatactaaaatataccaacaccacacacatgcacatggtagctgagcgaacagtttcgagatttcagcattaatttcatctaataagactttccgtctgctttcaagatcaacgtgctgaacatttttactctgctttcataatactcccattttaggctttgattcaaaagcccactcaatgcaatacctaaaatgatatccttcaaagatatgtttaatgaatatgcagccacagctttgaattcagattgaccttgtgttgcattaagtcagacacctctagatttgtgtggctgctctcaagaaaggatgttgaagaagatttatttacggaagaaataactgtatacggcattttattctttcttaaacgagcaaattaaagaatagacggatagagactggagctttagcatgtgttccgagaagtccttgacacgcgccacggttgttatgccgcacactacaatgatgtgtttgaaaaagtatattaatgcctattgtcaagatgcaattcatcaattccagcattgagtgattcttctctggtgcggtaaaacataaattttaaatctagtactcaaccaccactgaacaactattaatcatcgtggaaattattatgacggaaattgaatttgggcaaccccttcccagcaatctagactatgctgtttcttttggcattcctacatgggattcggcaataggctatgcggaaaaggtgccagaggtaataggcaaaatggctacaggatatccgaggtactttcctcaaccccccgtccagaggctttgtgcttactttgttaagaaatttgggcgaggttcagaaaactgtcgtccttttccatccgttaacctgggtttaaagtgtttcgagtacgtaaaatctgtctcaggacctgaaagtaaagctcaccttgaagtggaaacagttacgattaaaaaccgtggggcaaaaacgtcgaaagaaccggcggaattggtgctaaccattgctgctgtccttgcatcggaggaagagttcgagactgtgaaagagtattggaaattaagaggtgaatgtgtatctagtcgattggcgttgtctgtcaaccaacttcttgactgcgctaatcatggctcagagcaggtattgcgtgagctagaggctggtgtttttgcagcaaagaagggggaggagaaagcaaagaacctgataaagggaaggatagttgagaatcgcttcaggccctttggtttggagaagaaaaccccgaattgggagggactcaacctcaacccaaatgaagacgtttatcttgtatcaagtggcatgtctgcaatatctacggctcgtaatttactcaccttttgggaggagaagaagaattcaggagattcattaaacaagaccacctctgaccaaaagaaaaagccattattatgtgacactgttggcatcttcggcttccctttcaaagatacgcaggtcattatgactaaatttggaaaatgtaaattttttggatttggaaattctagagacgttgtcgaattacaaaagtttttagaaacaagcaaacaacgcattcttgccgttttcgtcgagacaccttcaaatcctctgctgaatatgccggatttgaaaaaattgaggagtttggccgaccagtatggcttttttattgtaattgatgatactattgggggccttaacgttgacatcttgccctatgctgatatagtcagcacgtccctgactaagcttttcaatggtgctagtaatgtaatgggcggctctgtcgttttaaatccgaaatcatctctgtatccatatgctcgtgagtacttcaggagcgctaatttcgaggatttgttatggtgtgaagatgcgatagttttagaacgtaattccagggattttgaagatagaactttacgtgctaatgcaaacacaggaatattgttgaatgatttgcttttacccgaggaggggaaaatatgcaaaaagatttattatccaactgttacttctaaggagacctttgagaactacgaaagtgtacgtaatgaacgtggtggctatggatgcttgttctctgtagcctttttcaatgagggcgatgcaaaagcattctatgactctttaaaggtattcaagggaccttctaatggtactaactttaccttagcatgtccatatgtccatctggcgcaccactcagaattagaagaagtttccaagtttggggccgaccccaacattattagagtaagcgtaggtttagaagatatccagtggttattgaaagttttttcaagtgctttagatgttgtgaaaagcagaggctccaaacactcatgaagcagatcatgagtagaatatcaaaaatcaagaattctttataatctttatagaatattgtttataaaagtttttttccattctagcatataatttttttggaggaagtcttttctggaaccttcacatggatcttaattaatgaaagtagacagagctcataagatcactagttgtttataaactgaagatgttccttcttattgacttcaacattatatcgctctgaattagttgatctgtaacttcagagtttctttaccagaataaaagcgtcacagtttttctttagtttatatgtacacaggttggggtttactataaactataaaaaagaagtgttgtcgccgctattttaaggtttatacacaattttaaccaaaaaaaagaataagttgagcaacgttggaactgcctctgcaacgaattccggctatatacaacctgcatctttgaaattcaaatatccaaagttaatgaagaaggataataattttcatcattcaaaaactttagatcttccacgggcctttccgcttgtggagtaatcctgaacgcatgtctgtgaattggttcttcccaatcaatcactgctgaatgttgaactctgcggttatcccaaatgacgacggaatgaggttcccatttggctcttaactgtaaatcatggctgctctccactagattgtacaagaaattcaaaagtgattcagattcttgtcttttcaattcgactattttcctagaaaatgcacgattgacatacaagcatttctttttcaagacaggatgaactctgaccagtggatgaatatgcgtgacaggtgctcttctttttatgccgccctggcgctgtgaattctctgcctgttcctttgagctatggatgacatgaagcgtgctcaagaaatcttgcaaaggcttcgacaacctgtcgaaagcctcgatcgtatccgcaaataacgtatctccaccaccatcaggaccttcaacaacactaaagaaagtataagaaggtggctgtaactcgtaagagacgtctgtgtgccagccaccagatgatgtcgagtcatcaaaaactcttgcaaattcttccgcatcaggtcttcggaaagtgatatgcagctcaggattgttttgagggtggccactagtttgatgaatgtgcaacttgccaaaatgtcttccgtattcagtcacataatcgggtccctcgtcagcaaaattctgatttctaaagacaactactcccttttgggcgacaagcaaagcgagttcatcttttgcagcatcagaaagatcagttagctggatcccattgatctcgagacctaatttcggggtgatcttcttcacctttagttgaccaacgttttcttttgcaaaaaggtttgaaaagttaccgtcagctctcaaagcaggatcatggtattcgtgaaattccagcgggccatacttttcagtaggatcccatgtaggcaaataatctggatacttcgatttctctctataagatttacggattttcaataaaccagatggagagacctcatcttggccatcataaaaatgggtatcaaaattcccgtaaccttgcttggaggtataattcaggtttttcaacccatttgtaatgattttgactggtaaatcggtagatggaagagggattgctgtttgagctgctgcaggagacatattttaactgggttactgtgctatgtttgtacaagtatgaaagggccgattatacagcaatagtacacctttttatatgtttctgtcatcaagaactgttactgactccttaacttttccagcattcttgttgtattgcctacataccttctttatgttagtagtatgataaataaactccatgtgccctgtggcgccaaataagaaatcgactcaagccacattgaggcttttgtcatcattcccctatatactaatatagcacctttccaagggccaagagctcgtccaatgagacgcatgagttgggtattttaagctgcacagtagactatatagataaagctaactagtatgtaaaaaacgttacatgctatggcgctcttagaaaaaacgcataatataagcttcaagtcagtttaagctatagttcgcacggatatcttcaagaagaccgatttgttgtggctgccatcccagctcttttctggtaccttcgcttgaaactgggccatctctagtgacaaaacaagtgaggaagccaaaatgactttccgcgtcatcaacagggatagaggccacgggaacattcaaaatttctccaatcacacgcgcaatatctttgaatggtataccttgttcaccaacgcaatgatacacttgtcctgtttttcctttctctaaaacaagtctgaacagaggagccgtatccaaacgatgtacagccgcccaagcgtttgtgccttgtccgacatagccagattttccggcagctttggcaatattcattaatattggtacaaaagccttgtcccccttgccatgaaccgagaatgggagtctgacaattcttgctgaaacacctttgtctttgtaactcaaggcaacctgttcagtgacagcacgcaaaattttggaatcttcatcaataccatcctgttcgttagcaactttgtttggtcgcaaagaaagtgtaccattcgtatataagaaaggcttgttagaacctttaagtgactctagcatagctacagtggcctgacggtcaatttcgcagcactgttcaaaatttttaaaatcatgcacaaatcctaaatgaataacgccatcagattcagtggcaccttttttcaaaatttccagatccttgagatcaccgcgaaggatttttgcagcaggatcaatcgacttaatctttgcagcagcctcgtctgaccttgccaagccaacaacttcatgacccgaggatattagttcagataatacggcagaaccaatgaagccagaagcaccagttataaatactttcattttttgatctcttttttattttcttttgtaaaagttgagttatcacgccttagcgcttatgaatacaagagtgattgtaagcatagttgatagaagcgggagccgttatttatacgttagttgagtacttgagggtcttcatcgcctactttttttccttaatatccttgtgttagtaatcatatcttcaggaaagccaagaactaatggcaaattaaatccgcggctttccctttaaactttttccagcacaatctattatgttgagaagttccgctaatttccgcattggaaaaagaatctcatctgcaaaaacgatggtttctttcttccacggaagacttatgtccgtcctctctattttcatattgttctttctctctctttttgcataacgtcacaataccctagtgctaccgtcattggcgcagcataagagtattgcatttcatgtcttcagattttgcctcgcgaaagagaaaacactaagaggtgaaaaacaataaaattatgttccagtgtgtcatacgtgaggttttatcacggggccaccgttctcattggttacttggttgtaaatgctttgcgttgtgataaatatatggcatgaaaaatcatatgacttcaaaaatgaacagattccagatgccaagcccgctttccttcggctaactagatgcgcgctcgcccttgaaatccttaatcagcacaactcaattgtatggacgtgagctctgacttttgcttccgacaattaggcctttcatatctgtccttctgagatgttatgtatcatgcattttgtatacactatgcaacacccttcgcaatggcgaaagcggaaagtcatggcaccatcaatcgtgctctgaccagtatgtaaaaaatttcttaagcctcaccatgttacagattggccagagcatctggatattcaccacacctgattgggaagactcatagttttatgaaagatttcttcagaaaaaatgacatgctgattttgtctacttgcgtgtgctttcagttctttaccagtacgatttggtcacgtgacacgcgatcaactacattcaatccatctgccccttgctggttccgagtatcaattctaaattgtggctaccactatagcaatagtacgccaagctcggatgcaaatcacggatatcttcttagcatccgagttcaacatccgagttcagcatccgagctttgcggcgaaaacttaacaagataacggataatcaaagttctctgtgatgttacggagtctttggtctgcgctgctgactaaaatagtgtgacacaacgtacatagcgccacccatattggccgataaggaccagacttgtggcgatgactgttaactctccgcgaatctttttcgaagtcgcaggtggcattgcagaaacaaaaatgtgtggcttctgaaaaaaaaaataggcaccccatttgatgtaagacatctggctaccccttgtacatttcagtcactgagcatcgaaggcacgtctttgcagcatgcaatagtgttcgaagttcttccatttacggtggctcccctcactggaacggtgatgtaatatgtagatagctaaaacatttcgcaggtccctaggaactggacgtcaagatgaataggtattgttaaaaatgcgtacctgttgaattgaagaggtcggaaaaatcaaagtacttaaacagacgattgattcgacatttagctattcaggttgcacttcttgaaggttgaacaaaacatcaagagaaaataaaaaagaaaatataacaaaaaagaaatgtcaaaagttgacgtaaaaattggagcagactcgatctcctcttctgatgaaatcctagttccttcgagactcgctgatgttacgctagcattcatggaggagaatgacgcagcagttccagaaatcacgcctgaacaagaaaaaaaattaaagagaaagctttttctcacaatattcacctttgtctctgccattaaccttttactttacatggacaaagccactttatcctatgattcgattctaggcttctttgaagatacaggtcttacccaaaatacttacaatactgtaaatacgctgttttacgttggttttgcaatcggccaatttcctggacaatacttggctcaaaagttaccacttgggaaattcttgggtgggttgttggccacatggactatacttattttcctaagttgtaccgcatacaacttttccggtgtcgttgcgttgagatttttcttggggctaacagagagtgttgttatcccgatattaattaccactatgggtatgttcttcgatgcttcagaaagagctgctgctcagccatttttctttgcagcatgtatggggtctccaattccaactgggtttattgcttatggtgttcttcatataacaaatcccagcatttcgttatggaaaatattcactatcatcattggtggtttgacttttatcatgacggttgttgtaattctgtggtttcctaataatcctgctgatgtgaaattcttttcaatacaagaaagggtatggattatcaggagagttcaggcatccacaggctcttccattgaacaaaaagtcttcaaaaagagtcaattcagagaggcaatgaaagattatataacctggttatttggattgttttttcttcttcaacagttagccaacaatctgccctatcaacagaacctgctatttgaaggaatgggtggagttgatgctctaggttcgacattggtatcagttgccggtgctggtttcgccgtcgtttgtgccttcatcgctacgttgatgttagcaaaatggaaaaatatttcagctttaacagccatcttttggactttaccagcattggtgggatccatcgctgcagctgctttaccatgggacaataagattggtatcttagcaaatatctgtatggcaggacaaatatttggtattccttttattatagctcttagctgggcaagttcaagtgcatctgggtacaccaaaaaactcacaagaagttcggtgtccttatttgcgatgggaattgctaatatcatatcaccacaaatatggagagagaaggactctcctcgctttttacctgcctggattgttcaaatcgttttatcattctctcttgcaccagccattttgttactgatccatttcatactaaaaagaaggaataatcaaagactaaaaaattatgacgaaaatttacaaaattatttggacagaattcaactcattgaaagcgaaaatccttcttccattgaagaagggaaagtggtaacccacgagaacaatttggcagtctttgatttgactgatttagaaaacgaaacttttatatatcctttgtaaatattgatgttttgttgtgtaaatgttctatctgacacttaataattagaaaattaattttttaaactttccggctgcaagaaagaggaactgtgtctctttgaaaggcacaatttcccaaagaatcatttacaatggtaaatagcttactgcttagaaaataatagataattgaataaatttatagaggaatttcttgacaatttcttcaaaacagccggtaaaagtccattaaagattagtttttcttaaataaatcacctaaactttcaaatttagcataaaaaacatgtagatatttgttctctgtactttataatctaacattttataagacagagactagtaacccctctagcctgtggttaaaatacgcaaaacctttgaaccctcaatatttttgccataataatgacaactatattgtacccatttgttcttgagttgtccgtatggatggaaagcagcactcgagtttgctgaaattacatacctcggtatgcaatatgcccagaaaatttgtaaatgataatttacataacaattcaaaacatattgatgtttttcgtgggtaaccatagttcttggaatgtcaactgagggtatttgcacttcaaaaaaaaaaatttattaaatgagactatatacagtgagcacaacctgtctaatacaacggcaaaaattatatacattggtagattttcaaaattgaactctttgtgctaaagaattgtcacaacagtttaaaaaatagtttgaattcttcaaattgaccccatattaataagacctgatgcgattccggtctcacccagattagagagggaatttaattttcttaggaccgtagctaccaaaaatctttgtgtggtattgattatatgatcgtgcttgcgaaaaaaatagaagactaaaagtagcattagtttactaactttctcctcgtatctttcaaatttgtattcccctcaaaagttactcaggttagggaaaattccaagtagcttatcaagatcaattgccattagttgattcaaggcttcattgtcataattcatgaggtcaatttcactctgtaaagattcgtcaacatcttcagtgaagtttctggaaaattcttgtgcggaaatgagtttttctaattcttccaaaatctccaaatcaagacttcccaagaattgtggattgtttaattttgtgtgaacgaaaaggacttatcccttcccataccccattttaaaccgacaatcctatggattcttgaatatctttcatccataacggcgtcactcttccagtagtcggatataaacgcagacagcgcgtcagtatccaccaaataaatgatatacctgaaaatagagacagaaatgaacgaaccgagataactcttttccagtttcgagataacaatttctacaagtaatttcatatgatatgacatcaacttgatcattttttcaatgactcgactaagtcttccgtttctatcattcaacattcccatggctgcagaggatctgtcgcatgtatccttcttataaaataatctcacgagcaaggtggcctggaatatgagtaatcgatgtatcgaaaagcgaacaactttctgagtggcaaacccaaaaggttcccgtaaatgcagaagagatccattaaagtattccgagattaattttagcaacgttaaataatcttgtatagcggtaaaagtaaagcggtgataatatgttttgtactccaaagcgtttttgaaacattgattttcaaaatgcaaagataagctatcatagatgttcattgtacaagtgtagctaatcacattagctatgaatgtttcattttcctcaaaagtgctaaagtcaaaagattcttcatttgctaaggaagagggaacattgatatgtaagctcttcatccttggttctccaagagaacttaaaatgagagggaatttctgatttaaaaaatcttttgtcttgtcgatgttatccaatacttccttcaagtaggaagggccatttattggaaaacaagaagtcagtaatacctgtaaagataaatgtaaatgatagatattctctgctgtagccatcaacgataagtctagattattagtagaagcgtaatttctctcaaatagttctggtagagattcgtcagttttcataaaggatcttaaatattccaaacttagaatgtcagaatctccttctggaatcaatattccaaacttcaaaaattgcacgccaagccataatttccttcttaaattgaataatcttggataatcgtccgattcgctgacgtatcgagtgtattggaagggttcttcattcagtcctagctttattgctacattctccaaaaattttaggtttagtatgtcactgtgagtaggatacatgtcagcttgatctggattcaaataccgcaatatgaaaaaatagagcagacaacaaagtgtatgttcattaacatattgaaaaacgttcatgagagcaagaagtttatgagcgagtagcgttaaattattcgattttacaccaaaagattctttaaatgaatgactagtacttagactcaaacgtctgtaagaaaaagccaatatgatagttagcagtgttattgtctccagttttcttctagagtctttgcccgcaaatacaatgttatacccattaaattcattcaattgcaacagctcccttatgttatcttcgaataatgatatttccagtaacggatagaccggatatattgttttgtaaaagtccacgattaagccatcaacctcattcttattgaggaaatatttggataactcttccaaaaggatgtttatggaaattttatcattattttcttcaggatgcgcttgttcataatcatacgtgttatacagaaaatctattggaggatacaatttgcttgtttttgaggtattttcaataaatttaagtgcagctttatcaataaaaaacaaaggtccaatatcaccgattgttaagttaagttctctttttttattgttggcagaaacgttttcacgatggcgttcgacatcaatcagtatcctctcatgtatgcaggtggtcaaggccttcgcatacaaatcatgttgaagaatgctatggaaggcaaaaggactatcaacgatggttgtgttattcattacaacaagcttgtcgtgtgcattcgataaattcatggcaaaatttttcatttcccagtctttagtacttggattaagtatggaagtaaaggaaccacttgcggacatcgatgcaggagtaatgtttctaatgtctctatgtggggcattttcgatagtgggagatttgttaatccgtcctggttccacttcgtagctacaaatcgaggatgaggccttgcatttggagcaagtaggccaaagtttatcacatttgattttcctttgcttacaccgcaagcaaacaaacgatggcttaacctttttctgagatgcaatgctcatatccagtgcagtacacttatcttgtcatagatttctgatgggtaaataattacttcacatcatctttgtttccaaagtttggcctcaatgttgcctttaggaggaaaaaatgtgaagaatgcatacttctgccgcttacgtaaaaacagaactctgaccagaagagataaaaacaaaaaaaaaataaaggacagtaaatatgaaaaataagatattattatattaaattaaattaaattaaattaaactacgatgggagcgttatgccaaaaaagataaaattctgagcagactactctcagtcttccttcttttgacctgccgccttttcggcattaacgtatgtagtgtaatcaaggatttgtaataattgccacactgaccaggctaagaaggcacccaaaagtgggctaatccagtagatccagtggtaatgagggaaatatctggcagcaacggcggcacccagagatcttgcagggttgacaccggtaccagtgtaaccggtcaaagccatgtgagccatgaataaagaaataccaattggaagcgcagccataaagttagtttcacgtttttcaacagcagtcatcaaaactgttaaacacaacacagcagtaccaaacatttccaaaaacaaccccctagatctggaacagcctaaacccaaagcattagtaaagagaaccttgcctggagtcatagcactagcggcaccaccagcagccatcccagcaatgatctgaggaaaccacatcactacacatctggctggtgagatggctctggccaaacacaaagagagagaaacggctgggttcaaagccccaccagaaacaccagatagaaaacatcacagagaaaccgaaaccaagggcaatcatgatcaattgacctggatgagagccctcaggctcggttgtcaaagccacatcatggttagcgacattacaaatgacgtaagcacaccataaaaacatgaaggtaccgcaaaactcacccacagcagcgataaagtggtttcttaaggtatctctgtcaatattaaaacgcgaatgcttcgtttccggctgttcaggtggaatataagcattgtcaacaccggtcgggtccaagtgcgaaatgtttttttcaaggtcgttagattcgttagacatagtataactaaggtaggctagtgtcgcttttgaatattttcaggaattgtaatagccaggaacaagaaaaaagacatgcgcacactaataagctactaaaaccaacatatttatactatcaaccgagagaggggcagatatgattcacgataaaaagttaataaaaggataacagcggcgctctaattcgttaatgaaagccatagtccggtatggacaaaaactatttccttcttttttttttttaggtttttttttaatttgcacttgcaataatctaattcactgtaggagtttaaagaaaaacatctagaaggattggaggaggtaagtcattattatggcggtgctcttttagcgggaaaaaaaaaaatacacctacgacgttaaaacagatcgtgctgtcgtctcagcggcagtaaaagtactgtagtagttacggtgcacgcagatgcaatgctaattaaataatcatgctcccatttttaagaagcagaaaaaggccgcagtaatttgagccgtgaaaagatttcggagggttgattcttaacattttccaaaaaaatgtcctttggtctgtttgcttgggtctgaaaagaaggactgcagcgccacctccactggttaaggacaaaatccatacttattccatctttctcgggacatattttcctgagacaaaagaccgtagaacttcaaagactcgttcccagaaagggatttagagttaatttttgctcggcatcaagccggaaaaattcaggcgccgcttagtaattaattgcaagtaaagaagtaccggatttattagacatcgtcttagcaagcaaattcctgaaagctaaaacgcaaataattaactaaaaatagttgctaaagagcaccttttatgcggtacataaaagtttttagtgccgtagatatatgtagatataggtgggcgtaggatcagaaggagccggagagaagatttaccaacactgatattcctcgaaatactctataattctctctgggtaaccgaggagtttttgagaaacggtgtttctaacatcgtccaccagaacaggagggccgcagcacacgaccgctaatgaatctccaggcggcgtactttttattgcgttttcaattacattgctaaaattaggtcttgcattgccgatgtgggcgaagcttgtcagttcggtcattatatcatcaaaatgtattaattggtctcgtgcgtttgctgcctttgtaacagctgttttctgtgtaaggtaaacctgcacgttgacgtgggatcggctattttttagctctagtatctcggatttatagccgttaagaaaagaaggatttttgatcgccatgatcaaatctatactcttgggtttatcagggtttcgtgacagcttaatggcatgatctaatggaccaggcaagcctgttcctccacttagtaacagcaaatggtcgaatttatcgaggtgaagattactgggcccataaggtccctcaatggccactcggagttgtaatttaccatttaaagattgcaaaatatggttataaatgaatctagtgagaccacttttaggtttgatcactaaaacacacttctcaccttcgtcgataatggtaaatggatggcattgccaaaataccaatggatgtaaaaaataaatgaaacaatattgacccggtttcgaatgccatctccggttatatttgggtatgattactttaaacatttcatcgtgcgggttgttgctggtgttcaaattgattagtgttgctttcggaaatctaaactgcaaaatgttccatattctgaaaagcttttccagcccccaaatgagcaaggataccactatccattctttccaaccgttgaaaattttgacgtgttgccaacaacagtaaaagaacaaaagggctagtatgatgtgggtgtacaggaaaaattcgtaatgtcttttccttactattccgagcgatagaactagtagaacgcaaagcactgttatggatgcaataccaaacttccaatagagctgtttgttgcttattttgaaggcatggttgataattgcgaataatgaataagaaagcgaatgtatcgttgcgtttaagaccatgattctaccgatccatttatggaaactaataaaggaattgaacttgactcctgttaaaaattcgagaaaactattccttgccgtaaaaatgataatgagagggaactgagtaaacgccagtatcccagatctatcagccaacagtcttgtaaactgcgacaggtgactgttgaaaatgaggttatatgggtctatgatgtaacttatggacaaaaatatgatgttcgccaatgtgtatccaaaaatgatccatgcctccaaggaattcggcatcagtcccgtaaagacttccacgtttagaaacttgaagtgattagcgtgcttatctactaaaaacgtaggcaacacaaaatggccccgaatataattgacgaaccggcttgcaaatagcgctcgattcaggccgttatagtgactcatatggaagaagacggcgataatacccactatgacgaagtagtaagttaaatatgcaccataaacactgctgatatctaaattataggcatgcgcatgaaaagctcgtatccatctagatcttgtctcacgatcgactcgaatggatgtcgataaactttcaatagaaccatagtcttccaaagcgtgagaagaagcattatttaaagatgagtagtattgctccagtgaaatattgctaaactttttatcgacaaacgagcacgtttttcgtacgttacccaagctttcttcgaaacttgtgttgtccatgggaataatctggtctgtaagcgaattgaagatacaaagtgaccaagtatcaaacgctggtgaataagagcatatggtagaatagaaacccggtacgacggagctatcaaatgaccacttcagagtatttatataggatgcgcatgccagcacagcgttggattccaaatggtcttttttttcagtgtgtggtaattttatattaaaagcctttgttaaagatatcagccacgttaaaaacagaagcgttctatgcatattcaacgagctatggtcgtcatgcttcactttagaagattatagaaaaatcattgctgcctggttcgatgaccttgtatcttttcttgatctacatggccagtatttccgttctgaatttagaattacaaatatgggtgcaaaaacaatgcccactagccggggtgtacgggaccttaaatctaagtattgtgttttagatagagttgcgaagagaaaattataattataataattctatacatgtattctgtatatatatgacgattttatatatagatatacattttcatttttcttgaagattgttgtcatttgtgaaatcatttaccttaatgagaaccagcgcctctgctgactctttccaaaacagaatcgtaagaaacttcggaaaaatcagtaccttgaacatcggtagagacaccgtttaaggctcttcttaaggcatccttggaggatgcatagaccatcttagatctgactggagcagtgtctggagaccaagtgaagaaaacaatcttggatctcttaccttcattaccattaatttcgtattcaaaatcgtaaatggcgtaaagacagtcgttttctggcaatttctctaagaaggcatcgtaagatgggtcagtagaggtttccttgacaacgatttcggttttagcatcgttcaatccgaataaaataaatttgtattttttacccaatttcaagtcattgaaagcggtaagggattcatcagcaacagcaacactacacagaaacttcacattttcctggcttcttatgaattttttcccccacattccttttaaagttccatgttaaaaagggaggaaagaaaggacataagagagcgagataaaacagcatcatgtcaattagttagtaattgatagtttacacaggagtacaaatgaaatttagcatacccagatctagacatcttcttttgttagttttttgtttatgtatgttttgaaatctgaagtttacgtagttgctaaccagtcttttcttgtttcctctttttcttccaattttgtcatcaaacaggggcggcgtcacccgaatattgttcttattacccggatattaggtaatttagaggtactgcatatagtataagtgattgatgaacttatagaatgttctctcgagcttccaaggccattagcctctaccaaaggaagtttgatgcctggtcttaagcttgttgaagctttagaatacaggtgtgaccgattggagcggcttataggcgccggatacagcgcgaattccgatgtttcagtgcaattagatgaactatacaatcagttacatcgtctatatttccagggtctaaagtattctcaagatctcctgcaactctttaatactttcatggctgaagacatcgagaacgtgggagctcctgatgatatttgtatttttgctagttgctttgacgatatttatacattatatagtgcatttgacgaactaaacagccaatatatggagttttgccaaatcagtaaaagttcattggatcagatttccttcaaagacgcaaatattgaaacgaaacagttgaagaagttacccgagttggtggataactgcaacataatgattttgaggtcaattgcaattctaaaccgtttcatcgactggaatattgaagttaacggattcttccagttccagaaaaagaggctgttgaatttacaaaaggtaatttatagtacgtgaacatgtgtgcgtatatacatatatatatatatatatatatatatatatatatatatactttagcatcgaaacagctagtcctttttagagttcaatttttccacaaaggcttttttagccaattcaattaggatatccaattctccactatgctcacacatgctataaaaggcactttgtttgttaagtaacaaagaatatgggtgatcatactcttttacctcacctgcatccatcaccaaaattttatcataatcgataacagatctcaacctatgtgcaattgtcaaaattgtactaccttggaactcttttcttatggtttcttggatcttcgcatcggaactgtagtcgatggacgctgtagcttcgtccagcaatatgatctttggactcctcagtaaagatctagcaaggcacatcaattggcgctgtccttgagacaaattggatccaccttcgctaatttcactacttaaatccaagaatttattaacattttcggagttagtcgacgaagcctcattgcttgtttctcttgtggcgccttgttgtaattgttcttcactaattagatttacacgtttcaaagcttcaaagatctgtctgtcactaaattcatcatatgggtctaggtttgttttaatcgtccctgagaatagtgttggatcttgtggaataatagttatagaacgacgcagtctttgtaaatcaacaccggaaatatcgatattatcaattttgatatggcctgtctcaggttccaaaaatctgaacaaggcggtaataatagttgatttaccggcaccggttctaccaacaataccgatcttagactgagcgtcgacagaaaatgaaacatttttaattactctaggtagatttggagcataccgtaatgataaatcattaacctcgattttaccgtcttgtggccattgtggtggcggtatttctttgtgttcgttgtatggctcttgctcaatttccatatattctttgactctttcaacagaattcatattcatctccacttcagagtacaatcttaccaaccacaatgccccttcagtgaaggaaatagcatacgtcaaagatataccagccatacccgaatccagattattaatattgaatagaatgaacaaaccagctccaaaaatgaccaaggatccaatcatatctatcctaaaggccaaccaacgattagcaacccacaagtagaagaatggtttattattttcatcaattttgtgtaaattctcttgcataaacctcccttcatcaccaaacgcacgaatggtggtaacaccgacaagagtctcggaaaaatgttgatagatcggtgatctagaaatagattcaaatcttttcaattcacgagaacctgccatgtagaaatacccaacaaaataatacaatattgaaacaactatagcaacagataagaactgtggagtaataaatgtaatcagtatgacggtggataaacattcaataagcgaatagaaggcgccttgtatataaggtgtcagttcctgatcaatagcttcgatatccttggaaaacctgttcataattctacctgttggagtagcatcaaaaaatcttatcttggagtgtaaaaccttgtttagaatcatattaaatatctttcttgacgcgttgataccagcaacgaaatttaaaatagttttaccagctcccaataaagcctgagcaaaaccaatgattaggtacaaaaccagataatacattgtagagtgtccactggaaggttggttttcagctgacgccatactgatttgggacgagcccctccaatcaattagatgactagccttcttggagataaatgcaatagcgcgttgtgctctgggaataattttagcaatgacattgtgtgacgcccaggcacgaacccaccatgattgtccgatatacaaaagttgggctatcaagaacaaggaagctaaaaatgaaacaatcttccaaccaccaaaaattttcaaataccatttatagacatccagaccaaccacaccttcttcttttgtttcctcttttattaatttaccatcttcagtgcgttcagcttctgtcctcaatgatttttgaagtttcttggcttcaaagtgggaggagttgttgttcacgctaacttgttgttctttgacagcgggtaggttacttaagcttgtgctactttttgcggctaagttagcagaagagtttgcacgcgataagatactacttttcactaactcgtcttcaccaaacaaacccttctgtaacatgtctattggatcaccttggtctttaaccctaccatcttctagtaagactaccaattcagcatttctcaaggtcaaggcgatgttgtgtgaaaccaaaatacatgtcctatcttccattaatggtccagtaatacaattatcgtaaatccaagatgcagtatgtgaatcaactgcacttaaacaatcatccaaaaggacatgcctagcattggaatacaaggctctagcaagggagactctctgcttttgaccaccggataaagtaatacccttctcaccgatttctgttaggtcaccggctttcaagatctcaaaatcacgtttcaatccgcatgcttcgacaacagctttatatcttgcctcattgaatggactattgaataaaatgttgttttttacagtatcatttagaagccaagcggcctgagaacaataagcgatagagttagtggttccattcgcatctactattagttcctgccttggttctagagctgggacgacaaccttaccattgagtagatacatttcacctaataatgccattagtagggatgtcttaccagaaccagtggggccaataacgacatttagtttaccagttttgaattcaatgttcaagtctttcaatttgaaatcttgattgtccttatcccaagagatggtggaattctcaaaggcaaatctgtttccatttggatctatggtcagttgatcgtatttctttgtatcattttcatttaagaaatcctgaactctatctaacgagacctttgattgaacgacaaaacttaacatatcagacaaacgatccaaaggatctcttaataacgtgaataaagaaagtgcagtaaaggcaaccggagtggttaatacctcgccttgaacgtaaatgtagtaagcaaatgaggcggctgttacaatagttggggtaacaaaccaaagaaaggaactgatagaccaaacaatggatctcattagcagtagagataattcattttctctaatagtattgatatctttttcaaaattctcctcccatgaaaagtatttgatgattctgatagcttgaaaagcttcattcaacttttgaatacgattatctgtgacagccaagtttttcttttgcaaatcgccgatgtacttggcaagcttataattcagtggaagcattgcgacaatgattaagacacccacaatcgcagcaaaacccagcagacggtataacagcgccagtgcgacaacagtcataacaaaagcctccaaaaatgaatgaaggtaaccacaaatttcagaaaccttgaaagcgtcaatagccatgagattaataatcgctccaaggttggcagaagaagtggactcctcatcgccgttgatacttttttgatcattaatttcctgtggatcctcattagaaggtttagtcttgttggtggaaatctttcttctcaaagctttagtataaatctcagagattataatacttttcattctgatacaaactctccttccaaagaatagtgcctgtgcttgacaaatagccactaatatcctacctacaaacatgacagtgacgtaaaaccaagctaaatttgagggagcagatgactgatcttcaacatattccaggatcctttttagtaaaactgttggaataaaagaaaggacgctgcctaaaaatgcccaaaagcattgtagtaccaaataattcgaaaagaaaaagaaaaggtttagtgaaaaaatacgcttccttttaaccttatggtcaacaaaatatctgaattttttcactacaaagaaagaataatcttgcatcatcaatccccaaatatccttaactttgatactaactttgtgtgctttccaaacaaaactgtctaaccaagcccagcatatgaatccagcaatagaagtgactggttctggagatggagtaatccagctgtcagttttatagatgatggcaaaattatttcttatcctcgcaaaaaagagtagcaagaaaagggcaaggttaatcgatatttgtgaaatgtaatactttctcgaaataggactgtttatatggtgaatgaaaatggaacgaaagggtaaaatcatagagataaacaaggccaaatagtttatgaacgataccgaccatagatttccgggatatttgtttatgaatttgaaattttggttgacatttgctaaacgtaaagagacaatgataaacaatgcacaccattctaccaaaccagtaatcgtaccttgttgggtgaactctgggtttttattgacatagtgtaatagtataaaagaatgtattataacttgagaaagtaccaaaaaaaattcaaggataattcttgatttttcaatgaagcctcttctaactatttcaggtgtaccatgaggttctccatttaccttaactgatttcagcttttccagagaaaagtgtctattttttagtgcgtcttttgtacaattattgtccacgtaattagttgtgatggtgttattatttatcaacggactctgttcgtcttcgtcggtagatgagtataaaagttcatcaattggatttttttgcttcaagtgtagaacgtcatagtagtaataatgtttccatatgttataagttatgaacaacaccgtgaatattaaaagcactaagggagtataataattaaggtactttgttctgccgtactgagttacgtcatcgtaaaaccaaaaccgatggtcaggtctcgttgaattgagtacgtgatgcatgttctccgtagcttttccccccttgatgagctcttctaaaaagtacaaaatctaggaaagtataatgtttcttaaatgcgatgaaatgaagtgaaaagaaaaagcgactggcaactataaagaaacaatgccggtttttcgcacttaattgttttcaaaagatcacttgtttatattagctgctaaattgtttattctatttaaaacgtgtagtaaggaaaaggcctgctctgtagttaatatattcttatctgaaaattttatatacttcattagtcacaacgtacgttctttgcagatgcgcacacaaaaaaaaaagggcaccaaaataaaggaggatgcgaaggtatgacacattttctggatacctttactggctaactattggttgtgatattttgcagagatgatgagaagtcaaagcaagtatactagctattttttttttttaattttgttttatttttgtattatctcctccttcttgtttctgttcatttttcttggcagaggctatcttaaccaacaatactctaccattacttgccttccgacctttaaattctcgacatttcttttgaatactatctccagtccccaggttgtcaaacttgatgaaggcttcgccggtgtgaaactcgtcggaaaagaaaactttgtttgttctcaaatccaccaattctcttcttacaaagtttatatttttagggtcaacaccaaagattttggcaaggtcttcatttgtcgatttcatgggaatgtttttcacatagagagtatttgtggatagtggcttgagatcaggagcagttttcttgtttgatttctggtttttttcaaaacttttttcctcttttgttaagatgttttcaataacaattttttcattcataaaaattttaccgttcatcttctctttcacttttttcagattcacaccctcttgaaattctataaatgcaaaccttttcagcggtttcttgagtggctttttctttagcatatttattgttatcttaccataatttggctcaaacaaatctctcaagtcctgtttacggcagtttttaggaagattgccgacatataatgtcctcctatcatttagtactcttttttttatttttgtattttcaggaacaactgttgttgttttttttccgttgacgttataaaactctatctcctctattagcattgcctattcttttcttaaaagtttctttcttcttaattttttcaagattacttgggaagatgccctatttccattgatttgaacgtatgtatgaatgaaaaggaagtgagaaggaacaagagaaaagaacaaaagagtttttagtttttatatttgcttacaggaacttcggcggctatttgttgtatcgtcgacagtgacgctgattctttcaaatataaatagctgccccaattagttttgcttggcaaaacccgacattgatgaactagtgccgcgcttaaaagtataatgttgctctattatttttcaaaaattcatacaaaagaaaacgggaattaagtaagtatacaaaatataattatattacgatgttcgaaattctatatatgaatttaagcggagtcggaagtcttagctctcttgtccatcttagcttgagccttgttaccaaggataccaccgccccagtgcttcttgacttcatcgtatttgtcagcgaagttagcgtcaatggtggaaaccaacttagccaaagcagcttcgtcttcggctctgacttcggtcaaagcggcaacagcagaagtcttttggttaaccaaagtacccaatctagccttacccttgataatggcgtatggaacacccatcttcttacacaaagctggtaggaaaacaaccaattcaattgggtcgacgtcgttagcaatcaaaaccaacttggccttcttgttttcaatcaaagagacaacatggttcaaaccgtacttaacagcgtatggctttggagaagcgtcttgcttagacttaccttcagcgatagcggcagcttccttggtcaatctttccttcttttcagcagcggtttctggtctgtacttgttgaacaacttgaaggtttcagcagcggtgtttctgtccaaagtgtattggaattgagcaatggttggaggaaccttcaatctgatggacaagatcttcttttgtctttgcaatctgacatattctggccatttgacgtatctggacaagtttctctttggttggacagcttggccaataccgaagttctttggagtagagtgagtcaatgggttcttagccttgttagacttagtggacttagcaccgaatggagctggagcaactttcttacctggagccatcttttctttcagttatcgtgttcactgtattgaaaaacagatataaaaaaaaaaaatagtgaatttcaacgtgcgcatcacaatacttatgtcttgataataatatcgatcccatactattgtccctggattttgagatgggaaaagtttcaatgcgttctatcgtatagtatgatgtattcaaaaaaaatgcgataattctttagttgtcggcacttcggaagccaaaaaaaaaaaaaaaaaaaaaaaagaaaaaaagaaaagggtgtctaagatgtacggatcttcattgggatggaaaacaggcaagtaaaaagaatagtaattattacaatggagaagataagataaagttagcggcaacaaataaagaactcatcagagttcttggcttctctatgagtgaaagtgtttcaaaggtgtttttttatgagacaacagtaattcccctccttcagaacagagtgtagtgattggcagtgaagctatccctctttgccacccaattttgacggcagttctcatagcatctcaaagcaatagcagtgcaaaagtacataaccgtaggaaggtacgcggtaggtatttgagttcgttggtggttatcctccgcaaggcgcttcggcggttatttgttgatagtcgaagaacaccaaaaaaaatgctgttattgctttctccgtaaacaataaaacccggtagcgggataacgcggctgatgcttttatttaggaaggaatacttacattatcatgagaacattgtcaagggcattctgatacgggccttccatcgcaagaaaaaggcagcaacggactgagggacggagagagttacggcataagaagtagtaggagagcagagtgtcataaagttatattattctcgtcctaaagtcaattagttctgttgcgcttgacaatatatgtcgtgtaataccgtcccttagcagaagaaagaaagacggatccatatatgttaaaatgcttcagagatgtttctttaatgtgccgtccaacaaaggtatcttctgtagcttcctctattttcgatcagatctcatagtgagaaggcgcaattcagtagttaaaagcggggaacagtgtgaatccggagacggcaagattgcccggccctttttgcggaaaagataaaacaagatatattgcactttttccaccaagaaaaacaggaagtggattaaaaaatcaacaaagtataacgcctattgtcccaataagcgtcggttgttcttctttattattttaccaagtacgctcgagggtacattctaatgcattaaaagacatgagtaatcctcaaaaagctctaaacgactttctgtccagtgaatctgttcatacacatgatagttctaggaaacaatctaataagcagtcatccgacgaaggacgctcttcatcacaaccttcacatcatcactctggtggtactaacaacaataataacaataataataataataataacagtaacaacaacaacaacggcaacgatgggggaaatgatgacgactatgattatgaaatgcaagattatagaccttctccgcaaagtgcgcggcctactcccacgtatgttccacaatattctgtagaaagtgggactgctttcccgattcaagaggttattcctagcgcatacattaacacacaagatataaaccataaagataacggtccgccgagtgcaagcagtaatagagcattcaggcctagagggcagaccacagtgtcggccaacgtgcttaacattgaagatttttacaaaaatgcagacgatgcgcataccatcccggagtcacatttatcgagaaggagaagtaggtcgagggctacgagtaatgctgggcacagtgccaatacaggcgccacgaatggcaggactactggtgcccaaactaatatggaaagcaatgaatcaccacgtaacgtccccattatggtgaagccaaagacattataccagaaccctcaaacacctacagtcttgccctccacataccatccaattaataaatggtcttccgtcaaaaacacttatttgaaggaatttttagccgagtttatgggaacaatggttatgattattttcggtagtgctgttgtttgtcaggtcaatgttgctgggaaaatacagcaggacaatttcaacgtggctttggataaccttaacgttaccgggtcttctgcagaaacgatagacgctatgaagagtttaacatccttggtttcatccgttgcgggcggtacctttgatgatgtggcattgggctgggctgctgccgtggtgatgggctatttctgcgctggtggtagtgccatctcaggtgctcatttgaatccgtctattacattagccaatttggtgtatagaggttttcccctgaagaaagttccttattactttgctggacaattgatcggtgccttcacaggcgctttgatcttgtttatttggtacaaaagggtgttacaagaggcatatagcgattggtggatgaatgaaagtgttgcgggaatgttttgcgtttttccaaagccttatctaagttcaggacggcaatttttttccgaatttttatgtggagctatgttacaagcaggaacatttgcgctgaccgatccttatacgtgtttgtcctctgatgttttcccattgatgatgtttattttgattttcattatcaatgcttccatggcttatcagacaggtacagcaatgaatttggctcgtgatctgggcccacgtcttgcactatatgcagttggatttgatcataaaatgctttgggtgcatcatcatcatttcttttgggttcccatggtaggcccatttattggtgcgttaatgggggggttggtttacgatgtctgtatttatcagggtcatgaatctccagtcaactggtctttaccagtttataaggaaatgattatgagagcctggtttagaaggcctggttggaagaagagaaatagagcaagaagaacatcggacctgagtgacttctcatacaataacgatgatgatgaggaatttggagaaagaatggctcttcaaaagacaaagaccaagtcatctatttcagacaacgaaaatgaagcaggagaaaagaaagtgcaatttaaatctgttcagcgcggcaaaagaacgtttggtggtataccaacaattcttgaagaagaagattccattgaaactgcttcgctaggtgcgacgacgactgattctattgggttatccgacacatcatcagaagattcgcattatggtaatgctaagaaggtaacatgagaaaacagacaagaaaaagaaacaaataatatagactgatagaaaaaaatactgcttactaccgccggtataatatatatatatatatatatttacatagatgattgcatagtgttttaaaaagctttcctaggttaagctatgaatcttcataacctaaccaactaaatatgaaaatactgacccatcgtcttaagtaagttgacatgaactcagcctggtcacctactatacatgatgtatcgcatggatggaaagaataccaaacgctaccttccaggttaatgatagtatccaaacctagttggaatttgccttgaacatcaagcagcgattcgatatcagttgggagcatcaatttggtcattggaataccatctatgcttttctcctcccatattcgcaaaagtagtaagggctcgttatatacttttgaatatgtaagatataattctatatgatttagtaatttattttctatacgctcagtatttttctgcagttgtcgagtaggtattaaacgcaaaagaagtccatccttttcatcattcaaatggacatcttggcaaagggcccagttatggaaaatctgggagtcatacaacgattgcagttggctatgccactcctggtaaggaatcatcaagtctgataattctgttttttagccctttttttttttttttcatggtgttctcttctcattgcttttcaattttaagttcgttacctttcatatagagtttcttaacagaaatttcacaacgaaaatataattaactacaggcatgtaaatataaaaacagtcctttaataataaaccttaagcattacgcgtgtattaatataataaatagttataaattgaataaataggggagagaagccaaaaggcccttcaaaaacaaagatataaattcatccttaaaaacaacaatacctgaagatactagaacaccttgtcgcctatgatggacatatatacagaccgggtcatagcattgccaatgataaataaataatagtcatagagagtaaacataaacgcctaacgtataggaatgtgtgagaatggtgagtttcgtccttgaaaataataataataatagttggtgcttttattagtgccaaaatcatttgagaggcttctgagttcttcggggctagctgtttttctgatagtctaggcaaatgccaaagatttcttaatttcagcaatagccaaaccaggattcaagccctttggacaagttctagtacagttcatgatggtgtgacatctgtacaatgacatggagttgtttagcatggcctttcttgtctttgtagcttggtctctagagtcaattagccaacggtaggcttgcattagcacggcagggcccaaatactgttcttggttccaccagtacgatggacatgaagtagagcagcatgcacacagaatacattcgtaaagaccatccagtttcttacgatcttcaatactttgtagcacttccgttccatcctttggaaacgatgatctctgtaagtaaggttggatagatttgtattgttggtagaagttagttaaatcaggtaccaaatctttgacaataaacatgtggggtaatggatagatcttgagttgtttggattcgttctggtcgatcttacatatacaagctagcgtgtttctaccgccaatgttcatggcacatgaaccgcagataccttctctacatgatcttctaaaagttagggtagaatcctgttcgtctttgatctttaacagcgcatcaagtaccatgggcccacagtcattcagatccacttgatatgactgtaaatgaggtttagcacttggctcgtctggattccatctgtaaactttaaaagttttcaatctgggggtatgcgtagctgcagctgttgtggcagtagccatacccttcttcgtcaccaaacaaaaggccttccttctcaatagcacgttcaacatccctataaatatgtatactccagtatttcaagaaagtatagctcaactatattcctttcaatcccttcctttagcctaacattttttggcattctcatagaaagtcattaatccccttatataagtttgccctttttacaccggagctaattgggccaatgcgaggccgccttttgcgcgctgcggatatttctaaggcatggtcgtgcggagctacaataatacgattgaattatagctacatagtgtacaaaagcgggtatatactttcatatgtgatcataggatagcttcacagtacttattgtattctctaacagcaatggcgatgttcctgtacaaggaccgacgttcttcaggatcgctgatgggaatgaagtattcggattgagacttgagtttaatttgaagaccggatctttccaatgtaattccctggatggaaggatatcctgtgctccacataagctcttgggtggccatttgcacctcagcaatgtgctgcatggacacaattactgctagttctttgcctggcaatataacgtgcgacaggtattcatcattcataaatactcctccattcacggtcttgagccagtattgtccttgggcctcacgtagatcataaggcttgatgatttgatcatggtccacgtaccttggtagacgcactctgcaacccttttgcatgtcaagcacagtggtggtacttttcacgccttgacttaagttacttgtaagatctaagaatccaatggctgtcttagttggcagcccaacgatacctttaccaaggcctttgaggaaaccagcggcgccttccttttgcatggccttgtatgggtccagtgcaattccgctcaacccgcttcccagtgtgctggcaaaggattgcgctgagtttgccaaggcattcctgttgtttttatttattctttgttgtaatctcctgaccctttggaattccagatcttgtgtaactgacaggcccttggccatcgaccccgtaaacttggacatactatcagagaggccaaagactgttttctttgcaaaacttagtccacctttagccagatgtataccaatttcttgaggcctatcattcatcatgtaaccttgatatggttcatagaataagtcccagacaccggaactaattgtgttgaaaagacctacaggattaccaaaacaatctgctgatcctaaaattttgtggatctgatacacgaactgggtcgtatagtgtctctcaatatggtccatcagaatgggcaatgggactcttacattatccatgaacaaagaattaactttaaccggcgcctcatttatattacctaatgtcatagcaaacatatggacatagtacaatgatgacgaaaatgactcctcggtctcttcagccaatcctggactaatttcatcggagcgtataaaggacagatgtaagacggtgggctgaatatggaagatctcgaaatatatatcacccgccgtttttaattcagaaacatcaggtaactggatttcttcatcgtacttataatctcttgaatccatgatccatggggatcctgggaattttatgaagtccatcatagcatacagcatgtcttcatctaattgtatggaaaattcctggattaataacgtaacatgtttaaagtatgggacagcctgtaaggaatcgttgactttagaaatagaacctgatatcactggatgattttcaatttccttttctgtgtaggggatttctgttggatatagaatatttgagtagtttcctgaaaataattgattatctatttgcatccatttcattttccaactgaaagtctggtatgctttagattcattgtatcttaattcgatccctctcatgttaatatatagaagttcctgtaaacgaccattgattaatgagataccaactcctttgaacgaaacaactatctgtgtattaaccttctcatcctcatccttttgcacaaagccatcagtcactgaactatttactgaaactgaagacgtggtagttgcagaggcagttttcaatttgtataacccaacattggccttatagttaacaataactaaggcctgcatatcgtcgtcagcaacaacatgtaatccaacaatgggggctggtttatcctttgaccttttatccaggcgtaacggtggcaattcgccaatctcagccaaccgaacttcccttgtacgtgtacctgattctaacaccagatatttctccttagctgtaggaaaatcccatgcgtatggcataatacttttcgagggaatcctgtaaaagataggtttgaaactacggcttgaggactcgttagactggtcatccttgtatggatcactaactttacgaggatctctttggtaaaatataaagtcatggtcgctgaaatttcttatggaaaatggccatctgtcaccaccgtccttgattcttatgaatattgttgctttgtccaaaagaatttcaatctttaaaagcttatggcgtgaatttttcaaaactttcaaatatgttacaccgacatttttgataaagaatggttgtgaccaattggagtctccgcctaagaatttcagcactaattgcttgtcgacgatgtttctcatcctgtataaaggcttagtgatgttcgattctatttgctggacatccatagaccctgtctcgcaaacttcaatagggatatctaaagtattgcttataatatacctaggtgcaatctcaataactttacttagcaagtacttccctttaccttcgctaatgttgatgcctaaatttgattcttgttccttattttttatgcgaacagatgcatcaaatgattggccaatagcgtcaaatgataatttggaactccactctgattccttgaacctaatacgagctctgttacttttatcatcttctttatcaaatgaaaacatttttggaatagtatatcttttttcgttttcaagcaaaatcttggattgtgcaatatttaagagactactttgaatgtagagttctctatcggtagagttcataataatataaggggagtatatccgaataactttggaccttgtaccatcgatgtttttataatctagtttcaacaacaaattctgacctccagatagggtcaaagacaacgaatcttctgggtttaaaggacttttatgtggtgtattaacgatggagggctttgaagcagaagcctcatcttgtaatggttgaacagacattagcaggaaactatccaaagaaatatgatgaacttccatactttctccagtcttcaagaaatctgttctcttctcctctcttttgtcaaaaatagagaagttaatatctgctggaagtaaattttcaatagtcatagatgccgaaaccacgattttcatatgaggaaagatctttgccaatggttctctttcatcatactttgcaccaatttcgaaatgaaatctttgattggaatcttcttttgaagaacagaatatagacatttggttgctcaacaagcttttccaagataacgtctgttgagaccaatcgtatatatcctctgatgcgggtcttatcctaatatcagaatcgtaggcatattctacaggaacagatttactttgatgtggtttaatagcatattttaaagatggcttatttggatctttggagtcaaccaaaagctcaatctcagttgaagttgtgttttcgataactaaagttgacctaaacgtaataatcttcacgttattctcatcacatctggcctcacaaacaattctattatgcacattatttcttggtgggctcaaaacatgcaagttttcaccttctgttgtggcatcaatattcataatggttttataattttgcccagaaacacaaacacccaaaatgttcttcgacttatcaatatccaatttctctctaatacttctccaatcttcaaattcccaaggaagagaagtgtttgcttttaagagcacaacttcgtttttgttgtcttcagtcgttttatcctgtatccagacgtcaaaatctaattctgtatcgtttaccagttgatatggcttctgagataccctggaagctaagggcagctcttcggttagagacgccgggatgtgagaaagcatagcgattgacctagcagaaagtgtaatttccgcgattctttgagttaaaatatcaaaagagaaagcaggatccatttcagaatgcccttttgataggtggaatgttattggaatcatctccagaagtggctcccagctagatctcgaatagttgaatatgttaacataggtttctagagaagcaagagcttcaaagtcggtagaccaatcctttgctgaagcagtgatttcatttacattcatgtccaatattggcatttcatggacgtcaccaattaaaataaatctcagtccgcctaagtcagcattgaatgtttcgtttttcaaaattgcagtaggcacttcaattgattcggaatctgagctctggctagccctgctgcgctcacctaaaatgcttggatccaacaccgctaatttcctttcaaattcatgagaaaattgtattttgtctgtgctctcctcctcctctccattatcctctttttccgtcatcttatttagcaatgtggtaactcgtttgaatattaacatcgccagacgaatatctctaagtgaaatacgcatcaacaggggctgaacggaaagctgtatattcgtcattagggtctgaggagttgagtttcttttatcaattgtcaaggaggatgaaaagtcgtccaataatctcaatttttcttcagacgaattcattttgaataggaagataccaacattattggctgcaactgtcataatattctgatcggttactaaaaattgtcctatcttgaaagaaatagcctcactattcatgtcgcaaggatcagcaagtaagatcagagccgtttcgatgatattaacagagtattggattttagtcacatcaccaccttcttgaacgctttcaacaatagccttgttttcaggcttttggtttgtgttttcaggatagtataaattgttttcgtggcttttggacataattgcatcaaaaaattctttgagagaaaccaaatagtccattgccaaaatcattttcggactgtccattgtcatcgaaatgttcaatagccgtccgacctctaagttctttctggaaatattagccacaaattgatattctttattcttactctttggtattagttctgtatgcttattatcttttatattacgaacatcttctatccggaaagcagcaacatgtgcttgaccatcgacggtcccatcattctttaaaccaaggctgcacccaatgtcttgaaacataattcttgtcagaccacagtcattcaaagaagtgacgccctttgtcttgttatataaagtaagggcaatctttggagctttaaaagaaaaatccaagtatttttgttctggattttttatattgcttttattcgatccctgtagagactgaggagtagctgtgcgttcgctttcgctacttaaagaagcagggtcaggagagggacttttgatctcgccttttcctcctgattcaccagagttttcgtctgtgatattgaatgcagaggatactttattggaaatttctaataagtaagtcagctggttctcagtcaaatccaacgcaaatgattcaaaattactcgttactttaagttctggagtgtcatcttgcggaaggggatctctgtctatattgaaaagtaaacctatattttcaactagatacaattgttgactggaaccatcgaagtttaagttcgaggataattggccctcgcggacaccaagtttgatatggtttattttatgagattcgtctattaccgaaaatttgttttcaataaagaactcacccaaataaaaccgcattgtatcgtaattgttctcttgtgtgcctactaatttaggaaactggataataggtgccttgattactatgtccattttcatgttatttacggcgtcaatggaaggggcttggttgtacgctgcaagacgagctctatcaaaggatactttagatttttgaaatttagcaaaaaagttaaccattctgttaacagcactttcgataaaattaacatgcatagagcccgtagaatattttaaaaacgaatcataatctttggtatttgtagccggatcgaatgattcatagctcaattcgactagttcttgacctttcatttgaattatttttctaaataccgaatccctggaaaacgattcatttgtttcatcagtcaactccaacccgcctaattttaagttaatgttgtatctttccggtagtaaaaccattgtgaattcaccagccgatagaactaacgttgccagctttatagaatcatcattaaaaataacattgacggcctccattttaattttcatattgattttttgtggcgcatcgtccctatcttctttattatgtctcaacacatcagccggcatttctggagcgttaggatccgtaaaagtaagcattgcataattcattaaagttaatacagatctaggtgttaataccaattgcaattcactcatatgcataacaatatcttgatcgaataattcaatcaaagtatcgttatgaggcacaattctctgcactctcttgtattttagcgtaaacaaatctttttgagatcttgtcactttttcaacgccggatgatatcaagtttttgaattccttgttatcagtcagctcgatgtaatcttcaacatctaatgaatgtactcttagatctaaattcatttctttggctctcttatcaaaattgaaatttagcctttgacacaatatatcaaccaatttttcgctgtttctggaatcatttttgatacattgaaagaatgctattttcgcctgatcgatatcaaaatggagctctaagaatttctgttcaatttgaagcggctgcatattttctaacgctttcaaagtattcttcaactgcaattgaatttgcttcttcatttctttttcggaaccagaagagtaattaacgtaatcgccgttgttttcttcatcatcaatcatagaaggtatagaattagcaatcaaattcataatagtcttgtattgaatgtcatttatggaaagacttaagcgaggcaaatgaccaaaaactcttatcgtgggtaatttatatgctttaggaaggattgatagatctacagttaactctaatttcattttatccaagattctaaaatcattcgtggaagaggcggtattgatcttacctatagtagactgaatatcaggaccaacaaatatctgagtatcctgagataaaatttggaacctatcaaacattaacctattgatttcgttaccgtcaatcttgtcatattcttccggcgataactcttttatttcctttatcttctcctttggcactaaatcactgagtatagacatatgaccggcatcaatgatcgcacaaggggtatcccaatcatgtgggtctaacggtaatatgattaatggtgcttgtaaatctaaagatacatttacggtcttgtggtcttccaacaaagactcaatacccattcttgtttgtgttgtccaaccttctacagttgcctcggcggcgtttacgatattgccgattgtttccatgtgttggtttgacgccttaaaaaacttgtggacctctgtaatgaaatgaacgtggtaaaacacagtcattcccaataacttaatgtttaagttcgaatctgctaatccatctagtggattcaattcaaatgaagcacgtaataaaggttcatcctcttcttcttcctccccggtagcgtggttgtcaattgaagattgatctttagatgagtttctgacactaatgatatgtttatataacgcgttgggtgagccatcttcgagactgaatttgttcaattggaaactcgataaaaatgaatcaggtctttgagcaaaatcaactttacaattttcaaaaattatggaacccaaatttagattttgcttcttctttcgtatagtgaatgaacccttttttaacaaactcgttacacgaagttcaaccctttctctaggaacttgcagtacaggacctttatcttcattctcgtcaaattcaatagcatcataaagctcctgacgctgttcttcagtcattattaaatcttcgtctacttcttctgtaggtttaccgttccaccaagaagagagccagcttccattatttttagttgcggacttgttggaagtttgtggttcaatatttgagctagctgttggtgtgggtgagtcttccgtcatgcccaacttatattgcgcgtactgtctcttagcgacagatctgaagagaataatttcatcatacgttaaatctttatgcaattcagataattgagcctcctgaatggggtcacgtagcggagcttctaaattttttaactttaacttttcaacccataattttgtgtacaacctccgttgttcacatttctccttcatgctttcccaagtccacattttgtttttttcatgaatttcattaataacacaagcagcaatgtatttaaaccattctgtcgggttttcactaactgcgaaggatggtcttgctttcttaaactttttggtaatttgtcttaactgtatactggagaggacatgcaagatatcattatattctgtatcatctaattctaaaccaaattcatcataaaacatttgcaagtcaatgtgaggttgttcctccgtggaacccagcttgttgatactaagcttccctagcccgctaaccggtttcaaaatgtattgatgcttgggggcagtggaatttttcgatgcaatcatatctttgaaaccccttacaaaattttccaggcttctatcttgatcatcatcagaaatcaagggcggagagtctgtattccaatacaaacagagtgaatttaaagtcaatagtttatgcgtgatattctgtgtaatatcaatgaaacttggagcccagttggaatctgtagatacagctgatagctcgttcaaagttaatccaacggaagatgggcctgtagtgaagattccgtccatgtcctcgtaccttaaatggatattttttatggtaacttgtaaattgtctatgatctttgtagtcaaagactgcataaacccggcgttatttttttctgaagaagaagaagaggttttgttctctgattgggtactcagtatgcgagcctgatttgtcagttcccattcacttaccttcctcatcttcaaccgaaaagctctctttatcatctcctcatcattttcgtgatcttctgaacgtggtgagcataataaataacagtcctcgataatgattttcacgggcttattctttaaacttgaccatgggaccgttaagaccaaatcacccagtatccctgatttcacatctatgggtaaatttaatgagtccaaacagtcttttcttagttttaagttttttaacttcacatcaccactccatatgccgacatttaattgattagggtcgaaattttccacatatgagcctagcaatcggtttagcaaattagcagctaaagactctaacatttaactgttcttaattttccttttttctgccttttcccttttggtagtcacaatattctatccgtatcaaattaaatagagttaaaaggttgactcaattggtcggcttatgtgcgtttactggagattgaaacatgataggacactataaaggtggtttatattccctaataaaaatccctttctatcaaaatagctaatggtattacccggcttcgcgaaaatagtgaacgtcatagtataagacgattcaaaaatccaagctcttgaaaaccaacatgaataaagacaataacacagttgaacaatttatttagtgttctatggagtatttatcaaaaaaaaaaaaaaaccaaaaagaaaaaaggagagtaaacatatatatattgacataatgaaaatattgcgaggactgatcagttaccacccctcaacctcaagacaaggtgaagagtggactccttttgaatattgtagtccgacagcgttctaccatcttctagttgcttaccggcaaaaatcaatctttgctggtctggaggaataccttccttgtcttgaattttcgacttaacgttgtcaatagtgtcagaagattcaacctctagggttatagtcttacctgtcagtgtcttgacaaaaatttgcataccacctctcagtctcaacaccaagtgaagagtagattccttttggatgttgtagtcagacaaggttctaccatcttctagttgcttaccagcaaaaatcaatctctgttgatccggagggataccttctttatcttgaattttacttttgacgttgtcaatagtgtcggaagattcaacctctagggttatagtcttccctgttagagttttgacgaaaatttgcataccacctctcaatctcaacaccaaatgcaacgtagactctttctgaatgttataatcagacagcgttctaccgtcttccagttgcttaccagcaaaaatcaatctttgttgatctggaggaataccttccttgtcttgaattttcgacttaacgttgtcgatagtgtcagaagattcaacctctagggttatagtcttacctgtcagtgtcttgacaaaaatttgcataccacctctcagtctcaacaccaagtgaagagtagattccttttggatgttgtagtcagacaaggttctaccatcttctagctgcttaccggcaaagatcaacctctgttgatccggagggataccttccttgtcctggattttcgacttaacgttatcgatcgtgtcggaggattcaacctctaaagtgatggttttaccggtcaaagtcttaacaaagatctgcataccacctcttagccttagcacaagatgtaaggtggactccttctgaatgttgtaatcagacagcgttctaccgtcttctagctgcttaccggcaaagatcaatctttgttgatctggagggataccttccttgtcttgaattttcgacttaacgttgtcgatggtatcggaagattcaacttccaatgttatggttttaccggtcaaagtcttgacgaaaatctgcataatctattagttaaagtaaagtgggagggagagttcgagagttcttgtcgtattgtagtagatagaagatatacttatccttatccgtacagttcttgctctttctgaagtagcactttcggaagaagaaagataagcaggcgaattcaaaggtggcaaaacccggagcctctctatatatacccccaaaaggaggaaccgccctcaaatgacactgaattctaaaaacaactgataagtggcatcgcccctgaaaaaagaaacgaagtggggtaaccaccgtgtgtggccggatgtacggctgtgtgatgctccactgggcggctatttttttttttggtaccgaaattggtttatccaggattattctagaacgttctagaaacaatactgaccacaaagacttttcggaatagaatattgtcaaacaagaactttttcactttcttttcataaaacgtcactttcatcacttttgcaggatttcccacagttcgtttaaagggacatttcctatcatgggttgccctgcgcgaataagatgattggtcaaggaagactctaaaatcatctgaacgggttatttgaagacttgggtctaaatgagagcttgcttattccacccgccacgccgggcgtatcttcactgtcttcttcggccaggggatccaaagagaatcgggcatattcgtgcgtattccttgtccgttgtctctggaaatctaagctagtgctggtggtgggaggctttgctttcttttctaagctttgtcgcgtgagctcgcttctcatttcctccagcttcaaatggctattgtccgtggacttcctgcccggagtcgatatgcttgagcggaattgtattacatccttgcgttgtttttctagtaacccgtcgtcttgcagcagccccagaacgttcctgcttagcttttgaatatcttccgccttacgttcatcccgaggatcctgaacctgaaaatcctccaggatctcaattagtatcatgtttcctttcagccacttgatgaattcattggacccgttattcatcagatatgagaccaaagtcagcgtcttcatcacctggatacaatttcgatgagaatttcttctgttctgcccaagtagcaatcgcttccggattacctggatgatttctcgtactgtcttggggctgtaggtcaagattgatatttcgttcataagcgtccccgttgctccacttgtttcgtcctcgttggtagcctgtttcacctttgattccgtcggtgattgaataaaactcttgaaggtatctaacaaaggcatcacgaccccctcactatatgtgtactcgttctttgacacctttatgctttctaggcttattcaacacataacctcaattttcgttttctcattcttttttctttttttttttttctcactaaagcgttgtcctagagatgtaaaaagagaaggaaatgaaatttttactggaaatgttactactattacacaggtttatttagaaagtacaaacgtgtcagcgtatttagggtgtcaatgcaacaatattgaaactatcatttgtcttcagaatagcggcaataccaccatctccgcataccacgtccatatcagtgaaatcggcagtgtcgctttgcaaacagagggcgctctcctcgtctttagtccaattttttgttttcttgtcaaatttgtatatcgtcagcgaattgctctcgtttgagtatgcaatcatattctttccagagtcgtcaatgtcataggtaacggtgcccgtcttgaattctgggattgtgtaagttggatacgctagcgtgccgacatcctttcttaggtcaaagcaaaccacagtttggtcacactctactaccatccagtacccattgtctgcaaatttaacctcttttatcttggcttcttcatctacggggaatctagagcttgcctggtcaggtgatgacaagttgtaaacgtctaatataccgtccggagagtaaagggctaataataatgaatccttatgtaggacaccgctgctgtactcaacatctgatttagcagaatgaacaatatactgggaatcatcctcgtaggattgaaatcctatggttcctctattatccgcccagatgaagtactctgtgttgacctcgttgtgaccatacatatatataatctcattggcggaatctacctctatttctctgaggactttgtttgtttttgagtccaatatagttatttggttacctggatatagtagtagcaaacgattacaaggccctctggaaataatagctggatgctctcccccggtacggggatttggtgtagttattgtggtaatcgttttcgaatcttttaattgggtaaaatgtaaagcaccatcctcacagcgacacatgcacacccatttatcatagtacatagatttgttaagctctttatatgggaatgttttgatgttacgggagtaattttgtgcctgtaatagctccaaattttttaaaatcggccatttgggtgctttgagcttgcccctcgctacaaagtctctagaagattgtaacagcccttgtaaaaattcttctctcgtaatagctaccgcttgctgtgaggatttgggtaaatccttcgaatcttcgtttttttccatcaatagttgcgcagcgaccaactttgcagcatctctttcgtacattacagtcgacagttttttcgttaaactatctagagttgatcgtaacttaaagttttcgagcattatagcatcccattcattctgtaaacttgtcaacagattcggaatcgaataattcgcttttaacgtagcagagtttgtagactctgttagtgaggcttgttgcgcactaggtacgatttccactatttcttcgatgcttaagggctcatttgttatcggatcattccccgtatctttaacatactgttcaaggagcgacttttcaaaaatagtcctggatttaggtgatagaactggccttctaggaactttcccactaatagcacaaagcattgttccctagttggctttcttggctatgttttggtctttaatatttcttggaaagtttgcatctttctaaaattgcccttacgaatttttcaccgctgctacccgaaaaagtacgaaatttatcaacatgaaatttattcctgccaagtcatcgagtgctctgcgcctaaggcttaggttgcatttaagttgtcttaattcacgcttatagtgcaggtagtataggttccccactcctgatctttcccttctgaaataaggaaagactgcagtttagtttggcagagagaagaagataatcatttctattatattctaccgctatggtgatagattccaaacaggatctacctcaatataccaaagattcaggttcagaatcggactcagactcaagtaataatttcattgtggaatctccgtcaattccatcttcaaaaagtgcaaccgtagttctcaatagtgaagagtatgaggacgacgaaggtgatgacttgaacgggctggatgctgaattgatcgataatataacgtatgaaggagatgaagatgaaactatgtttgtggggttgaaagaaaaacagaagttacatttatctggtgttttccggctgcaagtggtgaaaggaggtattgtctacaacaatgtacactataacgcttcgagagaaattttaaccttctggcacccgttatcacagtccatacctactatagatttttcgcactttgcaggctggcaagacactttttttatgccgagaaacaacaggtttaaaattagagatgaagaattcaaatcatttccatgtgttcttcgcgtttttaattctaatcatacgggcttgttagaagcaggtcatttatatcgggatgttaattatctatggaaacctaaagaaccttactttccattaaacgagagaacaacgtatcatttattacatgagtcagaccgaattcaatctttatccgtgccgggatattggtcaactccgttagagaagttatatttgagtcacaagaacgctgcgtatgatacaagaatcatggtgattggtggtaaaaactctgggaagtctacattcttgaggcttttattggaaaaatttacgcaagatatacgagattctactacgagccaggaagaattggtatacctggatttagatcctggtcaacctgaatactcactacctgattcaatatccctgaataagattctttccagccctatttctctcggacaacatctctgccaaggttcaaatttccaaactttgttacagttctacgctggctcctcttccccgcaggacgagcccacatcatacctgaactgcgctgataaacttatagaccatttggaagagcaagccttcttcggaacgtcattgcttaatctacctgggtggataaaaggattcgggatgcagattttaaatcatataataaggaaatataagcccactcacttattgtttttggaaacagctaattcgaaaagacacctggatgaactaacaattccacagagtttttccacatcactacgagatgcatatgcacctgaagttgttcgcgttccagcccatagtctgaaccacaccttatcttctaggttccatgcatcacaactgagaacattcaaaatactggcactgtttcataaaataactcaatttgattatgattttgcgcctcttttaaaatctgcacctttgcaaatttcatatggcaaaggtaaaagcggtattaaaggcattcaatttcctatggaattccaggatctgaatcctcaagatatcaagtccgcattggaaggtactgtcattgggatatatacatattctggagaagactcactagaggtgaaatccttgaatacctttcccatcctacaatcgtgtacttcttcttctaaaaatttcataactctggggctgatacactctattgacacctcccagcaaataatgaacatttacgtgccaccttgccatacccagattttagataaacaacctgaggatgctcaatggataatagtaagaaataagacggaaactcctttttgtgactttcttccatccccccgcacaattacatgggatgataatatacaaataccgttcgcaacttttgaaagaaggaaaaaattggaacatgtgtggaaagttcgtaagaacgtcatgagacgtggccaattcatgaaaagatagaaagaaaaggtaatcgtacattttttaatagtgaaagatagaggatacacaaaaatcatgcaaagttttatatatttgttatgtatactcatattccttcaatatctaagtcatactaacttctagggactttaccaaaatattatttataaatttattgtttcatttcttccgcatccttcatctcctccgttaaacccattttcttatttaatctatcatatttcagtctatctttatcgctcacagagggtttaatctttcttaatgcacttcggaagtcagacatggtcacaataatttcttcgccagatacgccaaccgatagatcctcaaattccttgtctaagtcattatcaagaacagattgtatttcttcgctctgaaaaaacttcctttttagagccaagactgaactctccctgactaaagcagccaagtcagcgcctgaaaaattgttgcacttctcatttctgataatttcttcaaaatcaacatcgctactcagaggtgttccgtgtgatttggtcaaagttttgataatatctagtttttcctcagtattaggtaactcaataaacaaactcttatccaatctgcccggtcttaacatagcaggatcaatcatatcaggtctattagtggcgccaatcacaaaaattccccttctatcgttcagcccatctaattccgttaacaaagtgttgacgactcttgaggaggattcggacaaagaagtatctcttcttggcaccaaagcgtccagttcatcaaaaaatataacacacggtacagacgcccttgctctagtaaaaacttgtctgatggacctttctgattcaccaacgtatttatttaataattcaggacctttgattgatatgaaatttgcacgagattcattggcaacagcttttgctagtaacgttttaccacaacctggtggtccccacaataaaacaccaccaggggcgctaattcccactttttcataaagctctggtctcttgatgggttgcacaatagccatatttaattcaagtctaactctttgcaatgcgcctacattagcccaagtaacatcaggtaccgtagcgaacccttctctctttgctgttggttgaattgttggcaacgctttcaaaaaatcttcgtacttaatcgataataatgataactgctctcctgataaaggctcaggataattacgaataaattgttggactacggataaaggcaacggatcgatcatattcgcagtgttcttcaggctagattcatctccgtttgctgtttcatcaatttccatgttatcttctgaactgtccgttgccgtagttggtgtggattttatattagcataggtttggaaaattcttttaatagcgcatgtaccggcagcagtaactaaagcctttaaatcagcgccaacaaagcctggggttaattttgccaatttggcaaaatcgatagcaccatcaatttttaggttatcagacattttctttaaaatatgtaaccttgagacttcattcgggacattcaggcatatttctctatcgaatctacctgctcttctcaatgctgcatccaaagagtcaggtctattcgtggcacctatgataataacaggttttccatttgtcttttccatcgttaattcatccattgaggtcaataattgggcaactattcttctctccatttctctttgggctcctccatcacgttttggtgtaatggcatctatttcatcaaagaaaacaagacatggtgccaagcttctcgcttcatcaaacaaatccctaatctttttctcgctttccccagacataccacttacgactgaaggtgcagaaatagatataaatgggacttgtaattctccagctaacgcattagcaatcgacgtcttaccgcaacccggtgggccatgcaacagaacacctctaggtggttcgacacccgtggataaaaatatctctggatgaagaatgggtagacctattagttccataagttgtgcaacgacatcatccataccacctaaggatttcagagacgaattaggtggagatctatcttccttgattttttgacgttttaccttacatgtaccttctttggatctttttttagattttttaacctcttctgtcttaggatcatcagtttctgttatagactcggaaacagatccagatttggaccacgtgctagttatgcgtttgttcatctcatttgtgtctcgctcaatcatcatatttttcttagctagttcttcttccaagcttggtttctcttcctcttcgttgttgtaacctgggtaagaaccaaattcttccaattctgattcaatcacgtcttttagcatgcggtcaattgtcttttgtaagacaactttcttaactctttgaagtgataaatctttagtcaaacaaaaggtaaaaatctcacctgctgttaaatctttagcgaaaaacatggattcaaatatatcctcatcttcttcaccctcgttgttctcgccctcttctccttgggattcttgtctcagagacctttttctgtccaaagttttttcttccaagagacgatagataagatcgacgatcttgttatctagagaacttgttaatgagttctttttcgactttactttaaccattattccagccttcccaccacgtagctattatcggccctaatgatcttttattctaactgactcgcagattaattcacacatcggttgttaatcattgtttgaatttccaaaatatgcgatgagctgaatgaaaaattttggaacctgtcactatcgacgaacatcgaagtttgccatgacaaccatatatgaagaaagcttatgagactagctcgagtatatcatacgtatgcatgttaatcgcagttaagcggataacacaatgcgtaagccttctattacgataacaacagcaaaagctattataactccagactatactcttattaaatcgcattctaaataccaacttccttcacgttttcaaaagctagatgcagactcacctgagagaagtacagttgttaagctattttaccgccgatttatgaggcttaagcctttcatatcgaatgtgaaaatggttaaagatacttacagggattatgttcgatataagtttatgaaagaaaactacgaactcaaacgatacttggtattcaatcctgatggcttgaggtcgaaaatcaatcttgagcttctcagcaacacgaaatgttgtgaaaggatactccccgtgactgagatgcaaagaaccttggaatttgttctgaagagctgttcatacttgcccgaaacaaaagttcaaaagtgggatattgcaagggacaacacatattgcaggcaaattttaaagaaccttttaacaatgcaatatgaaaagtacagatcgattttgcatagaggaataggccatgatgagcttgacgtcaaattctctcatttgaaaactacttctagtccgctaactaagctaaataaaaccgaaaagaaaaagattccgcttttcaaagtatttagtgatttcgatacaacattgatatatctcaatgagacattaggtacaaggttataaagatcattatcgtaaaagaggagcggagcggagctttttagtatgtatggtaaaatatcaatcaaatactgtaatagatgcggatatgcgcaatgacatattttgtggtgtgcatatccattgaaaaggtgcgtagaacgttacaatactactgaacttttttccttctcattttctgccattttgatatttatgcctattattggtttgagctttattagagttggcataattataatcgtactcgtatgtatatccgtatccatacccatatccgttgtaataagtgtttggtatatatcctttgatggcttgggctcctcctaccgtcgttataacaggcattttgtggcgttgtggtgaggctcctgattggctggtattatcgatggtcgtacgacttttggcattattcattgatctgaaattgccattggtattgctattactggtgttactcttgctggaggcagaccctagaacaaattttttaattatttttttaaatattattttcgtcttttgtgtttccaaataattggatagtaattcgattgcttttgttagagtattctcattagtatccttttcaaaagtaaaagtgataaggtccttctcaaaagttacaattatgttcataatttgcaaaaatggaacaacaattaggttataaaattcgtattctttattgggatctatctcttgatctattttgaactcgtattcataaccaaacgcactattaaccaattcgttagcggctcttgatgcattctcatcatttccttgtatactcaattgagatgttccatccaagggctcttttaacggtatcattatgtaaacattttcgttcttttcgatttgtcctataatattcttttggccgttaacatgcaaaatatgtctatattgcccactagaaaatctaatgagcgtcttcgattgtaaactatcatattcttgaacaatttgttttaaatcattcttggctaggcatatattagctttgtttttcctggggcacctaattatcacattatcatacctgatcatagaaattttattttgtggaagattgaaactattggaaaactgaatgaagacgttatgctttctcattgtggcttgaattaaggaaccacctgtacctataatcggtctgtgacaaacttcaggaatgaagaaagattcttcggcaggaaattcatttataacattcttaaatgattccttgaaatcagggaaagagtcactaaccaaatttaaataaaggttatcatcttcctcttccatttccagttgaattaagcaagcagatagttccattatacgtgttaatttaccatttttcttgcctgatatgaagtcttcaaaatcaggatgtatctcgaaaatggcttttatctgtcttaagtttggattaatcacttgatttgagcccataataaaatcagataagtaatgcaatatggaagtatcggacgcctcatctgtggaagattggttaccaactactattaattggttgaaggaatcctctttgggagttattactacaatttggtttccagtgtgtccgaaaaagctgtcgattattaattccggggacattgcgcagttttcattgagtgaaatctgtacttctacaatttcatgtaatacttgaatagtgaagttcttaataaccatttctaataagttcgtggaaatcgattgaaattcaatgtattcgttagtaactctaataagcgattggtatttcaaaattaactggtttaccttttgttggtagtattttcggataaacagtagttttcctggggtaatattagtcaatcgacgataaaaaaaactctttgaattcacgcttatggactcacgtagagttttcctagccagtaaacttagtgaatggacagcgcctgagaagaagatttgtggatttgccttaagatccctagacagcgtaatgagggaaggtgcgtaaatgctggttttaaaagctctggatatatgtttgaagttttccatatctacacccatatataagggaagcacagagtatgagttcagttccataggttcgataatgtagtgttgtggaggcaaagtcataccattcttctttattaaatcgacaaatgccaataactggggttcgcattccattaaattagatcggaatcctaatgcatgcacgtaaatacataattccttgctctcgcctgtctgttctggtgtgaagtaagctggttctttggtgatgattagttctaaattgaatttttcactcaagtccaatagtatacgtttcattttttccaattctgctgttagatcatttgtgttcataggtaagggcaaagaaatcctgcaaatagcatcgaggtccatatcatctgtggtagcttttattgagatcatgtcatctctaatgaaagaagcatttagattgacccatgagggatctatatgacagattgcttttgtgtttttaagttctttggagcttattcttttttgaagaaattcaactaaaaaaggtgcttctatgggcttccataatctatttgtcgtgtataagtgtggaacttgtaaaaaagcagttgtgataactgtactgtaaattttgaagttatccatgcctcaaccgtgtgtttactgctgtttttctttttaaacaattgtgtagacttaacctctgcgggcttgaatagtgcttcaaaaggttcaggtagtcaagaggttagctatataaacaaagatgacttttcatcctttatttcttttattttgtttttgttttttgcctttgtggaaaaaaaacaatctacaagcgaaaagaaaaattttggagaaaaatataatttaggattacaagaaagtgatagaaaaatgtacaatcttaaaagaataaagctgcagaaaagagatgcttttgctttcaaatttttgcaatatcaagagatatgatttacttgtatctaaattacatgtagatatatatatatagtatatttgtaagtaaagagtggaaatgaagttcgtcatttccaaaaaatgtcatttatgtgcttaatcaatctcccactagcaaatgcaattgtaccaaaagtaacgaccagttgagtgactattaaacttaaagaagcaaagataaaccttgggcagaagattttccaaaccatcaagtgtctacggaagtgagtaacccaaataaaggagcttagacataaaatagtattgtaagtgagtaatataccgcagtttgacacaattcttcctaaaagtgtttgtggcttcaacacatcaggaggctgtgaccacagtgtcagtaacgctacagataaggagacgagaatatgaggcccaaatgtatttaggatgatggctatctgagtgaaggggaacgttaccttttcagacagcataaatccgatatcccattgcactgatggaattgtggcttgatgaccggtggtgaaaaaatgttggtaagataagagtcccaacgcaattggaccaattatgttttcctttaattttaaaagatcgataatttctaaaattgatagtagttggttgcacatgaggaagtatgacaactgggccaggggtttgttgaatagtaggatactaatgagaacgtttatgaccaaaagaaaaaactctgagccgtaaatattagtataacctaaaattgttgcttcgtgagacttaacatcagtattatgaatgtttaatttaatacaaagtggtcccattagccagccgacattagaagcaatcaatgaaaaaccggcaataattctagccaacgtaaatttaaaaatagtgacgtcccgtaagaacggtattgctattaccgcactgttattttctaatgaagtcaatgaccaataaacaaagttcaaaccaaggataccctttaggaaaacgtttatccaaattggagctgcagcttgataagacgatgttagattataataaccggtgatgcatgcaggtaatatgaatatcattaggaaacagagacccaaaacccaccacgaggaattgttttgattattaaatgttggaatacaatattcgccttgttcctctctacaaatggtaatcatagaagctaaccgggtaaaaatgattaaaactgcagaatggtaacctcctagtaatcttgcaaatcttgttaatggtaagtaatttgaatttgctgtcgaaggattgacccctgaagtggttccttccttttcactgattgttgcagttaataatgcagtggtggattgcctttttggtaagaagacaaattcatacaacgtcaacatgccgaaagtagataaaaggaatgctacaattctatcctcccaaatagtaaatgaattggaagtgaaaagcaaagcatgaataatcataaacatgacagcaattcttgaccaataatcagctaatgtttcacccagtctcatagcaatccaaataaagttgtacctatcaaatattgtgatataacaaccaataatgataccaattgcagtcgctaacagggtaccccagaattggtctacaaaacttggttgttgataaacgtaaaaaattccatggaaacataggtttgtaactaagaccattatgataattcccggaacgaattctggaaccatttgattcacaacaatagaaggaattaattttgtaatggatatcaacaggaccagtgaagtggccagtagcgttataccggtggcaatggaataataatcgaatttggcccatagttcttcgcaggtctgcaagaagaccttttggtatttatgacccagcttaacaaatttttctggatcgcttgttgggggggtgttagatatatttttcgctaacggttccaatatttcgtcattgccatggtggatctgcatcgtgtccttatataattgtaattggcttatcgctgagttgacaaattgagaccattctctatcgtttcttgctatttcgtcaataggccatccaagattgttaaatggtatcggttggcccatcaataacgccaaactagacaccaaatcaatttgtctcactgaacggtaatcgtgtcccaaattatcaatgttgtaattcgaagtttctttaagtctccacatgtccggcttcttagaataaagaaataaagtgctttcgagctcgtcgatggagtcgccaccgtgattgcccgtatggtccattccatggtcacccaaaataaccaataaggtatcatcatcgatcgattttagtatccaatcgataaattgatctacttgaatttgtttttccctcatagtaaaatggtcggggccatatttgtggcccacatggtcaatacctagcatgtgtccaatcatgacgtcccattccttgtcctgctgtaaatgatcatggaagtaatccataacaccgttatcgacagtatctaagtcccacacattgagtgattctagtgggaaactatcgttggaaaggaacggatggaacagagccatccatgtatcatctccggcaaatttgacagtcttatttgccaaatggagctgtttaagaaagttatcctcttcgattactgttccatcgaagttagacccggcatcaatgaaagtcggtaaggaccctgttgtgagacccttgagtctttgtaaagtagtggttggtgggtcggcaatgaacttcaacaatagggaagatgcatccttatcgcttgcaaaagaatcatacaatgataatatattattatgatagttcaagttgtaattagagtgggattcgtttacaggaatagcgaaatcaaatctcaaagcgtcaataaccaaaatcaccgccttgttgaacctaggaggtaacttactcgtttcgttttgtgaggaaatattatcaagaacgtgtcttgacagtaagaatccccgagtgaaaaaagctattgatatgaattgtaaaatggcgatgaaaaccaatagaataatataaaatttatgattcttttgaaatttctttattcgcgatttgtatattattttttcatcattggaagatgaaagaatcgactttttaattgtcttttcatccatattacgggagctttttttttccacttaatgtattgatcttcctcccgttctttgacgattcggcgttgcccttaaaacatatgcttctattccttttttgatcttacccatttatttgtttttttttattttccggtggacaacaaaatgttaaaggaaaaaagaaagtaccttgctcgtcatcgcgcttgcataatgtgcgccattaccctgtaacaaaaacaaaagatagagtggcaacaacttgacacaactttgcaattgtaccatgaaccccaacaagaaaggcggttgagagtaaatgatgtggtttggttccttttttttcctacatttaaggttcatagagaagaaaattttctgaaatgtcttttcctcttttaatgaattgtaaaaaagccagtattggaataatattctattcaatatagtaagaaaagaggcaatgggcagaaatcttctcccgcataatcctttaaatgcaaaatacatgttaggcgtctaaatttttttcagtgaatccagatgcagaaacatttaaacaataaatatcttaaacccattttgaagcatcggcggctaaaaaaatgattttgcatggaaaaaaatgagagctgtgaacccaataaaaaagacagctttttaaaaatgtataacggtacattaagctcttgtttattcctcaaactgctcctaaaaaccatcctctcaaaaataataatgatagctgaagattatctgccacgaaatgccattgagccgcttacttgtaggttttcatgagtaataacgaagataatttacccgtctttataacccacgtaaaaataaacatataattatttcttattatttcaactaaccgttaaagtgttcaaatatggtagaaagctttccctatgtgcattatgattatcttttagccgccagagtttagtttaattttgttttgtttttgacgacttctggtgttacccgaaggtatatccccgggtgacccctaaaaatcgcaccccattttcccgaattttcttctacgttttcttttttcagaaatacttcgaatgagggatggaacaagaaggaagcgacatacaaaaactgagtcagtttagtcttaataggtgcaatatttacaaatacaggaaaggcaggaagcactggcaaaaagactgcatagctaaaaaaaaaaagaataaaaaaaaaacggagacctcaacagagcgaaaccaataattacaaacaaaatcttcatatgacttcgaaaccatccaccagtgacggcagggctcactcgatttcccatgtacctggcacgcacatgagaggaacatcggcatcacacagccccagaccgtttaggccatgtgcggattgtacgtgttctccaggcttactgtctaggcaaggtcgtagagcctctctatttttaagacagttagaaaattcaaggaggtcctccagcatgcttctcaacgagttgaagggcgctggcggaggtagcagtgctggaaatgggtctgtttactcatgtgactctctatgcgctgttaacagggaagttaacactactgatagattgttgaagttgcgtcaggagatgaagaaacacgatttgtgttgttatattgtgcccagttgtgacgaacatcagtccgaatatgtatcattgcgagatcaaaggcgcgccttcatttcagggttttccggatcggccggtgtagcctgtatcaccagagacttgttaaatttcaacgatgaccatccggatgggaaatccattttgagtactgatggaagatatttcaatcaagctagacaagaactagattataattggacacttttgaggcaaaacgaagacccaatcacttggcaagaatggtgtgtcagagaagctttggaaatggccaagggacttggcaataaagagggaatggtgttgaagataggtattgacccaaaacttatcactttcaacgactatgtttcttttagaaaaatgattgacactaaatatgacgcaaagggtaaagtggagctggttcccgtggaggaaaacttagttgacagtatttggcctgattttgaaactctacctgaaaggccttgtaacgatttactactgttaaaatacgagtttcatggtgaagaattcaaagacaagaaggaaaagttactgaaaaagctgaatgataaggcttcctctgcgacgaccggtaggaatactttcatagtagttgcgttggatgaaatttgttggttgttgaacttgcgtggatccgacattgactataatccagtttttttctcctacgtggctattaacgaagacgaaaccattcttttcaccaataaccccttcaatgatgacatatcggaatattttaagataaacggtattgaagtcagaccttacgaacagatatgggaacatttaacaaagataacttcgcaggcttcttctgcggagcatgaatttttgattcctgatagtgcatcgtggcagatggttcgttgtttgaacacctcaaccaacgctaacggtgcaatagctaaaaaaatgactgcacaaaactttgcgataattcactcacccatcgatgttttgaaatctatcaagaatgacatcgaaataaaaaacgcacacaaggcgcaggtcaaagacgcagtatgtttagtgcagtattttgcatggctggagcagcaattagtggggcgcgaggcactgatagatgaatatcgtgccgcagaaaaattgaccgagattaggaaaacccaaaggaacttcatgggcaattccttcgaaacaatatcctccacaggtagtaacgccgccatcatacattattcgccgcccgtagagaactcttcgatgattgatcctaccaagatatatctttgcgactccggttcgcaattcttggagggtacaactgatataacaagaacaattcacttaacaaagccaaccaaagaagaaatggataattacacactggtacttaaaggtggcttagccctagagaggttgatttttcccgaaaacactcccgggtttaatatcgacgccatcgctaggcagtttttatggtcccgcgggttagattacaaacatggcacaggccatggtatcggatcatttttaaacgttcacgaaggacccatgggtgtcggctttaggccacatctgatgaatttccccttaagagcgggtaacataataagtaacgaaccaggttattataaggatggtgagtatggtatcaggattgaaagcgacatgttaatcaagaaggccactgagaagggtaacttcttgaaattcgaaaacatgactgtggttccctattgcaggaagttgatcaatactaagttactaaacgaagaagaaaaaacacagattaacgagtaccacgcaagggtatggaggacaatagtgcattttctgcagcctcagagtatttcatacaagtggctgaaaagagaaacaagcccactatgacttcgaggcgagcggggcgcaatacaattaatgttagtatttattctaagtagtttctttctttttatttaatttgagtgataacaataacaacaataatgactaaaaggtgaaaattgaaaacattaccttcatttttttacggccggagaggggtaggtacacttaaccccgagcgcttttagtgccaaaaagagttaatgtgcgtagtcggattttaaacgaccatgcatgtacagccccctagtgatttatactgatgcctcatcaagaaattttttcatccagggtccctgctcggcgaacctttccgcaagagtcacaaaaatcaatcttataaccaggcaccagtagtactgccaagcttggactacatagccaacgtaaagacaaggagtctgatttagtatttcttttttgccagccagtattttctgcgcaggatagattattttaagagccgagaattccttatgcgggcccggtcacaacggattataggttccgccagaccccgttgctttggttccatggagcaggagcaggattttccgtggaaagagaagcaccgagcgaaaagcggatacggaaggcggatgcggaaacggatgcggacgcggaaggaaggaaggaagcaaacccttccgtctatgtcgctatgaagccgtctcacagtagagccattcgagatttccgtccgtcggtacacagaaatcttcgtatcgggagttttactttaaaaggaaacgatcgtaggaattccctaaagaaaaaggaagaaaaatttaacgttgaacattgtcattttcttttttttttttatgtgtgcagaatatactatcaagtaatgtgttctatatataaagggtacctcatttgatcttgatgtttctttctgctcgtatgccttgagtcaccagttttcaaaaataatcttggtctatagaagagaaaaatccaataatctgaaattggttcttcgcacccttgcaacgagatcatatactaaatatcgggaactctttatttctggatcttttatcagtcacttttttttttagtcaaagaagcaagagaaaactagacagagacaatgtcggatcattctcccatttctaataaggaaaatcatctgctgccatcagactcgtcaagaagctcatccagcgatatgcattcgacgggcaccacgggaaccacaggcgtcgaacctgtagatttcaccggtgaaggtgccaaatacacaactgctacggagggcaatggtggtgcagatttagcgattcaaagaacgacgactatgaattctgctgcagaatcagaggttaatatcacgagaagattaactaaaatccttactgggtctgttaacgagcctgaccgtgtagaggttgattataccaattgtgcgcccatgggtggtgacagaccttaccctccatcgttgccgagcagagacctgtacgaggttacttttgatggtcctaacgacccactacatccatttaactggcccatgaagaagaaagtgctgctatgtctggtcttatgtctggattctattgccattgctatgtgttcttccatttttgcctctgcagtgccgcaaatctgcgagatataccacgtcatcgaagttgtcgccattttgggtatcacgctttttgttcttgggtttgcggcctcaccggttatctatgctcctctttctgaattgtacggtagaaagggtgttctggttttatctgcgtttggatttgcccttttccaatttgctgtcgctactgctgagaacctgcaaactattttcatatgtagattctttggtggttttatcggggcagcacccatggccgtcgtccccgccgcgtttgccgacatgtttgatactaatgttagaggtaaagccattgcgctattttctctaggtgtttttgtaggccccattttatcgcctgtcatgggttcttatatcgcacaaagaactacctggagatggttagaatatgttgtcggttgtttcgcttccgcagttttcgttgccatcgtattgttctttgaagaaacacatcaccctaccattttggttaacaaggccaaacagatgagaaagcaaagtaataactggggtattcatgctgctcatgaagacgtggagctatccatcaaagacattgtccaaaaaactgtgacgaggcctatcattatgcttttcgtggaaccattgctactattcgtgactatttacaactcttttgtctacggtatcttgtatttgttactggaagcctacccacttgtctttgtggagggttatgggtttactgaaaacggtgagttgccatacatcgccttgattatcggtatgatggtgtgtgctgctttcatttggtatatggacaacgattatttgaaaagatgtagagccaaggggaaattagtgcccgaggccagattgtacgcaatggtcattgcaggtaccgttttccctattggtatcttatggttctgttggacgggctactatcctcacaagattcattggatggtccccacagtaggaggggccttcatcgggttcggtttaatgggtattttcttgccatgtttaaactatatcattgaatcgtatctattgttggcagcttctgccgtcgcagcaaacactttcatgaggtctgcatttggtgcatgcttcccattgtttgcaggatatatgttccgtggcatgggtatcggttgggctggtttgttattaggtctatttgccgctgcgatgattcccgtgcctttactattcttaaaatatggtgaatctatcagaaagaaatccaagtatgcttacgccgcttaagaaaaagaaaagcagaaatcatgctctttctatatttgcatttttttatttcattgttattactcaccctgccccacgctcaaagggctcgataacgacatagcattatagacactgtgcagcgtaaagctgacatataaagaaattacaaaaaaaaattaaaaaaaaaaaaaaaaacaatcaaaaaagacacacaactacagaacaaaggaaatctttttctatgcacaagcacaagagtacttagagagtagtgatatccccttttttttctactatttttttttttcccatttttttcctccaagactcctcttatgtggttgttatgtatagcccatagttactaaataaaacactaattaatgattaataatccctctctaataagaaatagataaaagctattgttcttctcatcgccggttctcggcgttgtccgtacccttggccgaaactcgggcgggggcttattagtcataccctcagatttcattggtcagataacagtcacccggtaaatgcccgtttaatgacttctttattttggattaaaattgacagggaatttcaacggaataaaggaaagagattgagatgcttttaattcataaaggaaagggaaagaggacaggaaagcaaggaagagtaatggaattttgcaaatatttgtaaatcctttagaattactaagaaactgttatttattgacattattttactcgtcttatttatttatttatacatttggccaccatttttgcactcgtacgaaagaccattttagatttttttgatttggtagtataacaaacgatcggaacaataacgtaacataatgataaacacaggaagaagcaggaattcagtactgctggcacacagattcctttcaactggaggattttggcgaggcggtacgaatggcacaatgtctcgcacaatcaacaacgtaaatcctttcaaattaaaattcataccgaagacagtgcccgcagctgcagactctgtctctccagatagtcaacgtccaggtaagaagcccttcaaattcatagtttccaatcagagcaagagtagcaaggcttctaaaagcccgaagtggtcgagctacgcattcccttcgcgtgagaccatcaaatctcatgaggaggccatcaagaagcagaataaagctatagacgagcaaatagctgctgcagtatccaagaatgactgctcttgcacagaacctcccaagaaaagaaagaggaaattgagaccaagaaaggcgctgatcaccctgagtccgaaggcaatcaagcatttaagggcactgctagctcagccggaacctaaattgattagagttagcgctagaaaccgtggatgttcaggactaacgtacgatctacaatatatcaccgagccggggaaattcgatgaggtagtagaacaagatggcgttaaaattgtcatcgattcaaaggcgttattcagcatcattggaagtgaaatggactggatcgacgacaagttggcctctaagtttgtcttcaagaatccaaactccaagggcacatgcggttgtggcgagagtttcatggtttaaaaaccttctgcaccatttttagaaaaaaagaatctacctattcacttatttattcatttacttatttatttacatatttatcatacatattaacattgaaccctccatcgtggtagtgtttgctgttcctaacttttctttcgttgttcttgtagatatatatttttccagaattttctagaagggttattaattacaatcttaaacgttccataaggggccgcgatttttttgttcaattttcaacagggggcccatctcaaagaactgcaaattatatcacagtaaaaggcaaaggggcgcaaacttatgcaacctgccagattattatataaggcattgtaatcttgcctcaattccttcataattcgttcctttgtcacttgttcctttttacccttgaatcgaatcagcaataacaaagaaaaaagaaatcaactacacgtaccataaaatatacagaatatatgaacgaccaaacgcaatttacagaaagggctctaacgattttgacgttggctcaaaaattggcttcggatcatcaacatccacaattacaacctatacatattctagctgccttcattgaaacgccagaagatggatcagtcccttacctacagaatctaattgagaagggccgttacgactatgatcttttcaagaaagtggttaatagaaatctagtaagaattcctcaacagcaacctgcacctgcggagataactccaagttatgctttggggaaagtccttcaagacgctgctaagattcaaaaacaacagaaggactcatttatagcgcaagaccatatattgtttgctctattcaatgattcgtctattcagcaaatatttaaggaagctcaagtagatattgaggccatcaagcaacaagctcttgaacttcgtggtaacactagaattgactctcgtggcgctgatacgaacacacctttggaatatttatcaaagtacgccattgatatgactgagcaggctcgtcaaggtaaacttgaccctgtcatcggccgtgaagaagaaataagaagcactattagagttttagcaagaagaattaagtccaacccatgtttaattggtgagccaggtatcggtaagaccgctattattgaaggtgttgctcaaagaatcattgacgatgacgttcccactatcttacaaggcgctaaattgttcagtctagatttggccgcattaaccgcaggtgctaaatacaaaggtgatttcgaagaaagattcaaaggtgttttgaaggaaatcgaagaatcaaagactctaattgtgttattcattgatgaaattcacatgttaatgggtaatggtaaggacgacgctgctaacatcttgaagccagctttgtccagaggccaattgaaggtcatcggtgccaccaccaataacgaatatagatctattgtggaaaaggatggtgcctttgaaagaagattccagaaaattgaagtcgctgaaccaagtgtgagacaaacagtggccatattgagaggtctgcaaccaaagtatgaaatacatcatggtgtaaggattctggatagcgccttagtcactgctgctcaattagccaagcgttacttgccatatagaagattgccagattctgctttggatttagttgatatttcttgtgctggtgtcgccgtcgcaagagattctaagccagaagaattggattccaaggaacgtcaattgcaattgattcaagtagagataaaagctctagagagagatgaagatgccgactccaccactaaagatagattaaagttagctaggcagaaggaagcttcattgcaagaagaattggaacctctaagacaacgttacaatgaagaaaagcatggccatgaagaattgacacaagctaaaaagaaattggatgaactggaaaacaaggcccttgatgctgaacgtagatatgatactgctaccgccgctgatttaaggtacttcgccatcccagatatcaaaaagcaaatcgaaaagcttgaagatcaggttgctgaggaagagagacgtgctggtgccaactccatgatccaaaatgtggtcgattcagacaccatttctgaaacagctgcaagattgactggtatccctgttaagaagttgtcagaatctgaaaatgaaaaattgattcatatggaacgtgacttatcatctgaagtcgtgggccaaatggatgccattaaagctgtttccaatgccgttagattgtctagatcaggtttagctaatccaaggcaaccagcatccttcttatttttaggtttgtccggttccggtaaaactgaattggctaaaaaagttgctggatttttgtttaatgatgaggacatgatgatcagggtcgattgttctgaattaagcgagaagtatgcggtctctaagttgttgggtaccacggcaggttatgtcgggtacgatgaaggtggctttttaactaaccaactgcaatacaaaccatactccgttttgttattcgatgaagtagaaaaggcacatcctgatgttttgactgtcatgctacaaatgttggatgacggtagaattacttctggtcaaggtaagacgatcgactgttccaattgtattgtcatcatgacttccaatctaggtgctgaatttatcaattctcaacaaggatcaaagatccaagaatctaccaagaatttggtcatgggtgctgttaggcaacatttcagaccagaatttttgaacagaatttctagtatagtcattttcaacaagctatctagaaaagctattcataagatcgtggatattcgtttgaaggaaattgaagagagattcgagcaaaatgataaacattacaagttgaatttaactcaagaggccaaggacttcttggccaaatatggttattccgatgatatgggtgcacgtccactgaacaggttaattcaaaacgaaattttgaacaaactggcactaaggatcttaaagaatgaaatcaaggataaggaaactgtcaatgtcgtcttgaagaagggtaaatctcgtgatgaaaatgttcctgaggaagctgaagaatgtctggaagttctaccaaatcacgaagctactataggggctgacacgttaggtgatgacgataatgaggacagtatggaaattgatgatgacctagattaatttaatatagtgtgatttttaaaaactttcgaacaagaatcagtaatataatatatataattaataaaactaatggaatttgtttaattgaacttgacacccgagcaaaagagctcacattttaacgtttagttcatcttgctgtgaataatctaaaagtaaacaatggacaaaaaagtccactggacgtcaaatctttttttattgtatttgggacatatggcgttgataactaaagtttaaaggaagtaataagtgaaggttaaatctggacctctttactttcatattagaagtataaaacacacgcggattggtccattattagaatacgggtactacaataatggttttgatagttactgtacatttgaatgtagcgactcatatgactcatatatatgactaccaaatcatgttaaaattagtatatctttaacttagacttcagtactatctgaactgcacgtttaaatttttaccatagcagttcatgtaatattaataatcacttgtgccaatataatgttacagcgaacatttttccatgcgcttggaaaattgaatgatagaaaattcgaacagcgatgatttccaacgatgtaatccattaagatgattgttagaatttctattgttgcagaggtcatatgatattaagaacacagcacaatatattaaaatttcttctcgaggatattgagaaatgggtgaattttgaggtaattgttgggattccattgttaataagggctataatattaggtatacagaatatactagatgttctcctcgaggatctacgaatcctcataatggaatcaatatttctatatactaatattacgattatccctcattccgttttatatgtttcattatcttattacattatcaatcctttcactacagcttcctctaacctcgatgacagcttctcataacctatgtcatcatctaacaccgtatatgataatatagtgatagttataactattagttgatagacgatagtggatttttattccaacagatataagaattacaaaaagagaactgttatttctacataataatattacgattagtactccttttatatgtttctttatccatttacattatcaatcctgattaaaattcccacgaacccccagtactagattgttcataatggatcaagttcacaagttaataagggcgtgtggtctagtggtatgattctcgctttgggcgacttcctgactaaacaggaagacaaagcatgcgagaggccctgggttcaattcccagctcgcccctttattttctttttttggacccaaagcactagcttaggctgtccatctttgttcttgattctaaagatcacagtagaataatggtttatttcttagagttctacaagttttagcgtactactgaacaatgaatgtcctgattttttaaaactcgcgcatatttggaggccatatcgtgccaccaactttactacagtcaaacacctgtgcccaattctaccacttattaaacaattacttagtaagatcagcaagcggttcatctgtcccccattcatatatggctttcaccctctttacctgtttgaaacagaaaaaaaattacaactaatggtatgcaattcataaagcataggccaaaagaccctgatacagatatatgctaaaacaataattataaaggattatgccgtaggaaggctgagaatcctcagtttgtgcactttgaaattcaaaatacaaaaaactgttgacaaattagtatcataactatctatcgcatatattcacgtcacataccgcctctgtggcaattgacaacacttatccctatcaaagacaatacaaagtatttgttaccgagtgagattatttagtacaatatgtgggtaataaaaactaatcggagatatttttttacgttttttgatgcaaacgcaataaattcttgatttttgaaattttgcaggacatcaagatacgtttcttttaagcagtttggattgcttctttcgttccgaaagtaaaacgtaatgaaaacccctatagtattgtgacgcgttttccaactctgcccttagcttgatttgacggcttagaacaaaggaacagtagcacgaacacttcaagtgcaaatgacagtttaattgtgggtaaaaaaggtagcctcaaagttgcattttttatggactgtaaagaacatacgattgttatacacttttgaacaaccaagatgtactacctcaattgtagtgaattaatgtcgaaatttgttagatgccccgaataaatagtaactttatttagggaaagcactcgaatttttgttattacggtcacgccatattttagcatgtacttagtaaaagacccatttcgccatcactatttttaccatttttttctatacgatttgggagcaaatacctgaactgcacactaatggacataatcacttggttgaaaaagtactatagtagactatacgtcgtacgctgcaatctattttaagcacagaaagcatccttcgtatgataatataacctttttggtaacagagttaccattgaagcgacattgcagtgaaacttgtttcaagatgtagttgggaggaattatgtgttgagttcgtccactttatgagctcgaagataacgagaaaattgctaagatgccggtgttggcttcttgcatatgaagaggcaccaataaaacgatgcattaattctttattacggaagttccgaagcagcgaagaatgaaaaagaatacaagcgctcataattgtcctcggtggacatcatatacagcataaaagtgtcttttttaagttctctcccctaaagatcacaaacttcacgtaattagtaacgtgtagactactaaccttgaaaaaacgaaccccttttctgcctagcaaccgtttaagatataccaaaaaaggcaactgtgatgacttctgaacgagggtccacgccaagtcacgccaagtttgttttcggatcttctgctagcagaaactcaacacacctacatgaaaggtaaagggtttcttagaaacattcactgtaccgtgcattgttcaaacctgcgcgattgcttggcaacggcgagaattacattacaagaaggtgtgctttcataaacgagaagtaataaacttgtgtcgttcagaaacaatagtatctcatattggctacaatggagaaacttacgatgtgtattcagtatattggttagaaaactgtagtttgttagttgaaaaattaatataaatagggtgtttttaatcagctgtaatagaagtacatcctcatccttcttcttcactaagctcacatcatcactaaagcaacaaccaaaaaacaacaaatacaatggtcaaattaacttcaattgctgctggtgtcgccgctattgccgctggtgtcgccgctgcaccagctaccaccactttatctccatctgacgaaagagttaacctggttgaattaggtgtctacgtctctgatatcagagctcatttggctgaatactatatgttccaagccgctcatccaactgaaacttacccagttgaaattgctgaagctgttttcaactacggtgatttcaccactatgttgaccggtatccccgctgaccaagtcactagagtcatcactggtgtcccatggtactctaccagattgagaccagccatctccagcgctctatctgcagacggtatctacactgctgtaccaaactaggatttgacgcccttacgaatagaactttacgagtattagaatgttatgaataaatgaaattggtttcgacggtatagatgaataaaggtattttgaaaattataaaaaaaagttttaataatatagatttggtaaaataaataggcgtatatacacattgtatactgttgatattatcaagtttttattattaaagagctctttttattttttatttataggggaaaatgaccgatattcctagtcttcaagtcactattatttttttttttattcataagtacaattgaataatattattgatttttttattattgttcttattctttttttatcatttctatataaaatattatatgatttagtttatcgtaaaaaaattaaaaaatacagaggaaagcaaaagtaaaacttttcggatattttacagggcgatcgctaagcttaatcaacttcttcgacagttggaccttcagcttctggagctggaggagcaccacctgggaaaccacctggagctgcgccttctggagcaccaccagcttggtacaatttagacatgattgggttggcaacctcttgcaattccttcaattggtcatcgaattcttccttggtagcagtggtgttgctgtctaaccaagcaatagtttcttcagccttcttagtgacagcgtccttgtcagcttgctctagcttgtcaccagcttcagaaatggtgttcttcaaagagtaagcaatggattccaattggttcttggaagcaattctttgagattccttttcatcttcttccttgaatttttcggcttcagcaaccatcttttcgatatcttccttggacaatctacccttgtcgttggtaatagtgatcttgttagacttaccagtacccttttcgacggcggaaacattcaaaataccgttagagtcgacatcgaaagtgacttcaatttgtgggacacctcttggagctggtggaataccactcaattcgaacttacccaacaagttgttgtccttagtcttggctctttcaccttcaaagacttgaatcaagacacctggttggttgtcagcataagtagagaaaacttcggatttcttagttggaatggtagagtttcttggaatcaacttggtcatgacaccaccagcagtttcaatacccaaggataatggagcgacatccaacaacaatagatcttgagtcttggaagattcgtcaccagtcaaaatagcagcttgaacagcagcaccgtaagcaacagcttcatctgggttgatagatctgtttggttccttaccgttgaagtagtcagtgaccaatttttggacctttggaattctggtagaaccaccgaccaagacaatttcatcgacttgagatttatccaatttagcatctctcaagaccttttcaactgggtccaaagtagatctgaacaagtcagcacacaattcttcgaatctggctctggtgatggaagtgtagaaatcgataccttcgaacaaagagtcaatttcaacggaagtttgagcggaggaagacaaagttctcttggctctttcacaagcagttcttaatcttctcaaagctctttggttggtagacaagtccttcttgttctttctcttgaattcttggatgaagtggttgaccaatctgttgtcaaaatcttcaccacccaaatgggtgtcaccagcggtggccttaacttcaaagataccgtcttcaatggacaacaaagagacatcgaaagtaccaccacccaagtcgaaaatcaagacgtgttcttccttacccttcttgtccaaaccgtaagcaatggcagcggcggtaggttcgttaataatacgcaagacattcaaaccagcaatggtaccagcatccttggtagcttgtctttgagaatcgttgaagtaagctgggacagtgacgacagcgtcattgaccttggcacccaagtaagattcggcagtttccttcatcttacccaagaccatggaggagatttgttctggggtaaagttcttggtttcacccttaaattcaacttgaatttgtggcttaccgtcaacatcgatcaacttgaatgggaagtgcttcatatcaccttggacttctgggtcattgaagtttctaccgatcaaacgcttagcgtcgaaaacagtgttagctgggttcatagcagcttggttcttagcagcgtcaccaatcaatctttcagtatcagtgaaaccaacgaaagatggagtggttctgttaccttggtcgttggcaataatgtcaacacgatcattagagaagtgagcaacacaggagtaggtagtacctaaatcaataccgacagctttagacattgtataaatatttctgtataaaatctgcttgatctgttggaattaatcaattgaagaatagaagtaacttaaataagagagtattatattttcaacattttttggagaaaacccagcccaattgcggcttatatataacaattcgtccacaccttcccatagtgcttaagaatgaaatttcgtcaaaacctcgaagctttttttttcgaaatcttcgatggaatgttctagaaaaaaacttcgagaaagtgaatcggaagaacttctcggaaaaaaaagcttcggaaatactacgaataagggcccaagagagagtaagaatgcagtgccatgcagtcaattcaccactgtgagaccgtaaaagggttggttgagtaactcaattcaaggaataaagatataaaattgataaaaaatatataacaaattgtaacaaaaagcaaaagagaggagtggaatgttatacaaagtaattagaaggtattgaacttgtaaaaagtaataataaaactcaattctgcttcttggtcacttgtggggcaccgcttaagcggtactcagacaagcggatcaagctcattttaattgcattataagctcttttgacgaatggtgggatagatgggtggcttatgatcccgtccattctaactctccattgagcaaaggcggctttcatgtacttggagttttcgtatcttaacttaataaagatggcgtacacaacaagtatgatccaagacctttggaagcacagaatggctctgaaaaggaccaaaatgaaaataagcagctcagcagtaccgacccagtgcatgcacaagtcattgtactgaacaacaaacttgtcgatgaagctgaggatcttacttgaatctttactggaaaggtggaagacttttggtaagagaactttttcaacgtagattaaaacatggaatacagcaaacgcgaaaaatgggattaagctgaatgaaaatcttggagtgaacaaccagaagttggccaaaaccaaataaagcacgtcttcactctttaggagtccagcaacgcgtgattttatggaagccttagtggcagcggcatcttgagtctgcaatggttcattgcgggtgaaaaattgctggtaaatgatgataccgaaagattcgatgacaccgagatatgccgatctgtaataaaattctgacatcttgagcaggtaaagaatggagctgatcaatacgacggaatgaccggtaaaccatgcaaactgcaagctcttggctactgccatgaacctttgcacgagcgacttatctctggcagggaggtttggggggccttggttattagcgggtcttgatgacattatactgactattcttggctagtgtttcttgctccttatgaatagagaaaaatgactttttttagatgtagtaagtatgtcatttcagggatggtctgcttgctctttaaatattttttcacccttttaaaatggggccctttcgccgtaccaaagaaggagaaatatacattacgtatgtaggttgctacattttacacaaaactatcaatgccttctaggcttcttcttgaccagttgagagagatcattgaagtcaccaaggggcttttcgagggcggggaagccgatggaggtcgtgggctgcgaaagaggcctcttggagccgtgctgctgattttcttgcacctcatcaatatcgtcttgaatctgtgcgagccttgcctgctgtaactcgctgtccttgggtcttgtagtcatgtgtttttcaagcagagccttggcatgcttgaatctttttagtttgtccttagccggcacctgatcaacccaccttaaagcatcacacaccaaaaattctgcttgtatcaccttctcagttacttgttctgcgggtttcaaggtcttgtaatagccaagcgccttcaagtaatgatgaatggctctactgaacatctccgcctccctttcgatgtcacccatcaggatatacacatcaccgatgcgcaatctgctgttctcggttagagattggccatctgctgtagggcggcccaacagcatcaaggcctgcgccagtaggtccaaagcattctcatacagatcattttcaaagtaaatgtggaaaccagacttgcgaagttgcgatacgtcttcaatttcatcgtcatgttcattcgctggactgaagttagccaattcgtgcaaagctaagcgttcttcctctttctccacgttttcttcctcttcttcgctaccttcgccactgtcctcactatcaccactgtcgacatcaccagtcaagtcttcctcttcttggtcgaattggaacatcctagaattaggaatttctgtttgaccgttctcgttcccctcttctccattgctcacatcagactcaggctcagactcagactcagacccagatccatcgtcacctgccagaagagcgtccccaaacagattaccagaattctgtacttccatgttgtatacagcttgtgcgaatatagtaaacagttcaggatcaggcaacaaaccatcttttgggagagagtccaaagtttgttggcagcgtttagcagcttctaagaactttttctgtgcgagtaaatcttttgcaatttgaacctgtctttccatatcaatttgaactttatgtctgctagttccgtttgccaacacgtcttctgcccttagtttcatattctgttacttctagaaggagacctcatcgccgatgttacctcaaaattgagtagaatgaaataatacaaaattggaaaaaacgcgaaacttcagtgcagtaacatatcgttccgacattctctgagaagtggtaagattccactgccggggagctacgagtgctcttgcaagtttttagacactgctatatccttcgactacgtaaccccatttttttatttttctatataaaaacatgcactgtatacatataatcacgtaagttcaagtcgtgcttaaaacgggcacagaaaactaactatgagttgccgtaccatacataaactaggagaaggtagcgcagttctttttttttaccaaaggtttgcacaaaaaagatggtctaacgtaagtaagttatcaataaaactgttaaaagtagtataagaatcttgagataggcttattattatgactttttatggcggaaaaggaagaagaaatactgcgccgggtgatgcgtgacgcgtttttggaaacgatgagaataaactttgaagtattttgagaataatattctattatcgagttctttcagcagaaagcaacacatagctacgtatagttcggtaagataaatttggtcagaagcgtgtgaaagacgctgagaaaccacgtgagacgaagattcaaatcaaggcgtgaggaataacgcaatacgagccaccgaaacagaataaacaaaagaaaagaaagagtaaacatgggtacgtcaagcgaggtttctctcgcacatcatagagatatcttccattactacgtctcactgaagacttttttcgaggtgactggcgaaaatcgtgacaggtcaaattcgacacgagctcaaaaggccagagccaagctgttgaagctatcttcttcgcaattttacgagctgagtacagacgtgtccgatgagctgcagaggagaatcggtgaagatgctaaccaaccagattaccttttgccgaaggcaaatttccacatgaaaaggaaccaggctagacagaaactggccaatctatcacaaactcgatttaatgatttgttggacgatatcctttttgagatcaagagaagagggttcgacaaggatttggatgctccacggcccccattaccgcagccgatgaaacaagaggtcagcaaagacagcgatgatactgcaagaacatccacaaattcttcctctgtgactcaagtagctccaaacgtctccgtacaaccttctttggtcattcctaagatggcatctatcgattggtcttctgaggaagaagaagaggagcaagtaaaggagaagccaaatgaaccggagggaaaacaaacaagcatggatgaaaagaaagaggctaaacctgctctaaaccccatagttacagattctgatctgcctgactcccaagtgctcgctcgtgatatcacatcaatggcaaggactccaacaacgacgcataaaaattactgggacgttaatgattctccaattatcaaggtagataaagatatcgataacgaaaagggtcccgaacagttgaagagccctgaagtacaacgggctgagaacaataaccctaactcagagatggaagacaaggttaaagaactgactgatttaaacagcgacttacatttgcaaattgaagatttgaatgctaagttagcatctttaaccagcgagaaggaaaaggagaagaaggaagagaaggaggaaaaagaaaaggaaaagaacttaaagattaactacaccattgatgaaagttttcagaaagaattgctgtcattaaactctcaaatcggtgaattatcaattgagaatgaaaatttgaagcagaaaatttcagaattcgaactgcatcaaaaaaagaatgacaaccataatgatttgaaaatcactgacggttttattagcaagtactcttctgccgatgggctcattccagctcaatacatcttaaacgctaacaacttgataattcaatttactactaggctttccgcagtacccataggcgactccacggcaatttcccatcaaattggcgaagagttatttcaaatattatcccagttatcgaacctaatctcccagctattactatcggccgacctattacagtacaaagatcaggtcattttactgaaggcatcattatcgcatgcgatcacatcgataagatatttctctgtttacggtcccgtattaattccgaaaataactgtgcaagctgctgtttcagaggtttgttttgccatgtgtaatctaattgattcagcgaaaataaaatccgattcaaatggtgagagcaccacctctaatgaaggtaaccgacaggtattagaatattcttcaccaactgctaccaccccaatgacgccaactttcccctcgacttctggaataaatatgaagaaggggtttataaacccaagaaaaccagcatctttcttgaatgatgtggaggaagaagaatctccagtcaagccattgaaaattacacaaaaggcaattaacagtccgatcataagaccgtcatcgtctaatggagttccaacaacctcaagaaaaccttcaggaacggggctatttagtttaatgattgattcatcaattgctaagaatagctcccataaagaggataatgataaatatgtctcgcccataaaggcagtaacatcggcctccaattctgcaagtagcaatatttccgaaattcctaaactaacactacctccacaagccaaaatcggtactgttattccaccgtcagagaatcaagttcccaatattaaaatcgagaatacagaagaggataataaaaggagtgacataacaaatgaaatctctgttaaaccaacttctagcattgctgataaactgaaacaatttgagcaaagttccgaaaagaaatcatcaccaaaggaaaatcctatagcaaaagaagaaatggattcaaaaccaaaactatccaataaatttatcacttcaatgaatgatgtgtccacagatgattcaagctctgatggtaacgaaaatgacgatgcagacgatgatgatgattttacctatatggcattgaaacaaacaatgaagagagaaggttcaaaaattgaaaaaaataatgacagcaaactacctgcaaatatagtggaacttgatttacatgagtcaccggagtccgtgaagattgaatctcctgaatcgataaaggaaatcacgtcatctgaaatgtcttcagaaatgccaagtagttcgctgcctaagagattagtagaggatgttgagccttcagaaatgccagagaagggcgcatctgtagaatcagtcaggaagaaaaattttcaagaaccacttggtaatgtcgaatctccggatatgacgcagaaggtcaagtctttgggtatgacaggaaaggctgtaggcccagaatcagatagtagggtcgaatctccgggcatgacaggacagattaaatctttgaatatggcaggaaaagttgtaggcccagaagcagatagtagggtcgaatctccgggcatgaaagagcagattaagtctttgggtatgacaggaaaaattacagctcaagaatcaatcaagtccccggaagcggctaggaagttggcgtcatcaggagaagttgacaaaattgaatctccaagaatggtaagggaaagcgagtccttggaggcagtaggcaatactatcccctcaaacatgacagtgaaaatggaatccccaaatttaaagggaaatactgtgtctgaacctcaagaaataaggagagacattgcctcctcagagccgatagagaatgttgaccccccaaaagtactaaaaaagattgtctttccaaaggctgttaatagaactggatcaccaaaatcagtcgaaaagactccatcttcagctacactgaaaaagagcgggctcccagaaccgaatagccaaattgtttctcctgaattggcaaaaaattcacctctagcaccgataaagaaaaatgtcgagttacgagaaactaataaaccacatactgagactatcacttctgtggaaccaacaaacaaggatgccaatacttcttggagagacgccgacttaaaccgtacgatcaaacgagaggaggaggacgaagattttgatagagtgaaccacaatatccagatcactggtgcatatacgaaaactggaaaaattgattatcataaaatacctgttgatcgtaaagcaaaaagcgaagcagaagtgcatacttccgaggaagatattgatgaatcaaataatgttaatggaaaaagagctgatgcccaaatacacatcactgaaagaaagcatgctttcgtaaatccaactgaaaattcacaggtaaaaaagacgagccactcaccatttttaaacagtaaaccggttcaatacgagaactcagagtcgaacggcggcattaacaaccacataaagataaaaaatactggagaaactacggcacatgacgagaaacattatagtgatgatgatgattctagctatcaatttgttcccatgaaacatgaagaacaagaacaagaacaaaacagaagtgaggaagaggaaagtgaagatgacgatgaagaggaagaagacagtgattttgatgtggatacatttgacattgaaaatccggataatacactatcagagttactattgtatttagaacatcaaacaatggacgtcatatccacgattcaatcgcttttgacatcgatcaagaaaccacaggtgacgaagggtaatttgaggggagaatcgaatgcaatcaaccaagtcataggtcaaatggtggacgctactagcatatcaatggagcaaagcagaaatgccaatttgaagaaacacggtgattgggtggtgcaaagtctaagagactgttcgcgtagaatgacaattttgtgccaattaactggcgatggaatactagcgaaggaaaagagcgatcaagattatgctgacaaaaacttcaaacagcggttggcagggattgcgtttgatgttgccaaatgtacaaaggagctggtaaaaactgtagaagaggcaagtttgaaggacgaaataaattatttgaattcgaagttgaagtaaagttagtagtatctagaggagaaagaaaaggaagacaaagacaatcaatagaatgtattatgtatgacatataataataataattataataataataataatagtagtagcagtaataataatattattatagtatattaaaacaacaaaaaattagtaaaaatactataaatgtttgaatatgaagatatatatgtaggaagaatttttattgaatatagaaatttaaagaaatattattaaaaaccggaaaatgaaaaagaagagttaaaaaaaaaaaaaacggaactagtaaaagatgtgaaaaaaagaagagaaaagtagaacgagaacacccactatccttgggtattattataagttgcaataccatcatccagtatgcccagattaaaccattcatggtccagagcgtcctttgcggtaatcctttttgttgggtcgaactcaaacattttcctgagtagatcgatgaaccagtaccaaaacaagaaagtttccttatcgagttcatcagtagttgaggaagaagaggaatgtgtttgtcttttccatgccaatttcgaatttatcaaagaccagtttttctccggcggtagattccaattgatgcttaagctatcgccgtaatcctgtttcaagacctttgagatgtaaatatctaagcgatcacatgactgcaagacccttttcattgacttttcggtggttatggtatctccgcgtttatttttttcaggccattgtaagcttaaagtttttctgtcgaaatgctttatcaccgttgaatttaggtctgatggagagttgcccaatttatgtttagatttgtaaaacatcttatcaataatgtctgtggggaaaggggttccattgattcgttgcatcatagccatatgttctagattttcatgaatggggtaaagagattcgccaataaccagttctactaggacacacgcgatggaccaaatgtcgcaggggaacgaccagcccaagccaaggacaatttccggggctctatagtgacgagtggatattacaggaggatgatattcgtaatggaaaattgcgctaccgaaatcaatgattttgatttctggatttttcaagattttgcgcttccccttactggcttcacggcgtctcttgcttagcgactgtacggttttcaaaggcaatttttgagcaatatgggtttcgtcacaaatcaggatattttctggtttcaaatccgtgtgtattatgcccaaatcgtgcaagaagcagacagatctgattagctgtctggcaatggcctgaatatgagagccggggaacctggcaatgccgttggagcacataaaatcgtaaatggacctgccgtatagatctgtcaccaaacaaatgtgatttttgtaatcgaagcactcccttagcaagaggcactggaactgaccttgagggtcattattcaggatagtctgtagaattcttagttctgttttggcggcttctctatatctatctacagcccttatcacttttacagccacgtaattaggttcatacttgttatcgatgcatttaagtactttaccaaacgtgccttggcccaataggtccttcacaacaaagcggccgccactgccaaatatgtcgttttcctggtaaacgtagtgaccgtctttgtccgttttgaaatttgatttattggatgatgcgctttctgaagagccgtttgatgtaaatttccgtagtgaagaaccaatttgtttcttgaggttggattgaggcagggaagctatttgtgctggtgggttggaaaagggagaagtgctgtgagcaatcgtgagattcactgccttgttgccctccagagtctttgcacacgaccccgttagatgcaacagctcattttcagtttgcgttactcttggcacgatagcgttggtttgatcaggaacattaaaatagttcgattggtagctcagcttcgatagaggcaactgaggcagtgagatggttctttgcttcttgaatttctttggtgtcgtgatatacgtactattgcttgtagctgcggtaccgcaccctggattatttgaagtaacaatattattgttgttattgatactgctgctactaggcagaatcaaaggtgacgaaaactgaattggctgctctttgataaaaatgatgtcatcgtcagcatcctcgtccactcgactactgttatgattattactgttattgattgtggtgttaatgatacgcggctcctcgtctagttctatggcattttcattgtccaagaacaactggtgttggtgttgccgaggacggagcggattgtctgcttgattcaggtctagactgttcctcagattgtctgttagaaaagaattttgccgagcaaacatctcgtccagcagcttgtttgtgcgcgtttcttcgaaattatccaaaaaggtcttgttagagcttgtattgttagcagggcccgtagtagtggaattattcatatttgctcttgaacgttttctagtgccaatttgaatattctgtgacataactaaggtacgcggaagataaagcaataatgaagaagagcagtatgcgtgtagattagtctttgttgtgctaaatcttcgacttggtaaatactatgtttctttcactctttttctgtctcccactttgtttcctttttctttttcttttttttttttgggtttgcttgctatctggcgcagtatttcgtgaatataatatctatttagttagcgtaagcacgaggagttactgcactgtttcctttcacttggtggtgaggtaacaatactttgtaaatccggtagatctgggaagtaaatactaaactttattctaatataggaacttcataatataaaatccaacgcacgatgctagagataaaaaaagagggtgggagatgtggagccaggattcaaatcgaaaatcgtaatcggaaactaaaccagcattgcaaccgggccataagccatatcgttaagcacgccaaagctttttcccttcgctgtgtgtttcctcgcaactttaactccggccactcactaagccaaggcgtgaggagagagactaaagctttgtggaaaaccgcccaatcacgctgacccctttggcccgtttgccgccccctagaaaaaaaagaaacggacgggcctgggcccgcacagcctcgagcagggtcacttcgcgccatatcggcggctatttcaaaaaaagaagttctttaccagttgttgtagaaagtatgatattaccaacagcgtctagcttttattcgatattccgatgtgggcggctatttattatcggtggcgtcttttatggttttaccgttgttgcctggagcatcctcaggaagacctaaatgtgaccattcatcgtagtccatcaattggtggtccatcctgcaccgcaggtagtcctttgccagtagtctacaattcattgcattttcgttctgcacaagctgcatacatttgagatactcttgcatgtacttggtgcattcgccgtcgtggtctagcgggaacgaacctctctcgggtggagtaggtctcaatgcgctcagcgagcttcctgggttccctgacattggattcttgtgttatgtttcgtaaaagatactttgtgtgtagtgggtgcgtttgcttgttttcttgaagtatagaagaaggaaagaacggaagaaaaaatttttttccctcttgttcgctttatttggattttctcgtttctcaactccgcgaatttgagcccttttcttagaccccggagagaagatgcagagatgtagtaataaaagctttttatccaaaaagcttttaagctgttgttttaaaaaaggttaaatgggcgctttagagatcgggtagtgggcaaagcctgcgataagaaaagagggagcgtgctacttgaccgggagcagcaaaatgggcggcccgagccttagatcatactcatcgccgataagagtcagcttggtaatagaaccgctggtgcgtaaatgaggcatagaacttattatcgtcttaaaaaactgcccaaaaaaatattttccaggtttcttgaagagtaatcttgttatgtaatttttttttgcctgtggattgtataagggaccagaggcggtcaaaaacgcaaaaagcggcatggtaggcgaaaatactaggacgattactactcaactgacgcgtcaacttaatattgtcctggtacataaccgaaccatcccagatgcgctgtaagtactgtttaaatgtattttaatatgtgcatagagcgtgtaaattatggcgagctatggtttccgaattgtcggactgctcatagcccttgctttcggaatattagaagtggtctggcggtaaagaaagtgtgacatatgtcagacgttgagacttatatgtgtaaagctaaatataataattcagttaaaataaaagtgggtgacaggaaaaaattagaaatgttgaaaatttttttaccttcactcgctacataaaaacgttggaggagactccttcatggtcttaatctctttggatctcttgggaacaatgaagctcttctgatatttttcaaatccaaatagaacataacaactctttccaaaccgataccaccaccggcgtgtggaggacacccatagctgaagccgtcacagtagtcctttagacctgggtcctcaggagacaaaccatgggctttcatcctttcttgtaatagagcatggtcgtggatacgttgtgcaccggacaagatttcttcacccctcatgaagaaatcatacgagttagaatacttagggttggctgggtcgggcattgtgtagaagggacggatctccaaggggaacttgtctaggatgtaaaagtcggtgtcgtatttgtcgcgaaccaacttacccaagaacttttcattttcggtactcaagtcttcaaaatcaccaatttccttaccggcagctcttagcatttcaataccttctttgtatgttagacgaaccatcttaccatctttaggtaacttgaattcttcaacagggtattgcttacgtaccaactcaatttcatgagcaaatctcttgggcaattcactgaaaataaacacaaacaactcactcaacgtgtccaaaacttcgtggtaatgttcttcgaaagccatttccatgtccaaaccagtaaactcggtcatgtgacggtgggtgttggagttttcagccctgaacacaggcccgatttcgtaaactctttcaaagtcggccacaatcaattgttgcttgttaaattgtggagattgagctaggtaggccttccctttgaagtatgtcacctcaaacacactggaaccaccttcacttggtgcacccaacagttttggtgtgtgtacttcggtaaatttctttgtggccaaatattctctgaacaactcacaaacaccagcttgaatcctgaaaatagcttggttggtgacggttctcaagtcaatgacacggtagtctaatctggtgtccaagttgaccacgggcaaacctgcagcttcagcttcagcttcggaacgggaggcatcttccaaaaggattggcaatgcttctggagtctcggaaatggtataaatcttggtaatgtgaatttccaggttttgcacagtagcagacttgattggctcatctaccttcttgacaatacctctgacaaggacaatggactccaaattcaatgaaccagcccatttgaccatgtttttgctgatggtaccttccttgttggcctttactagaccttggatcaaggaagcttgttgccttaaagttaaaaaggccaatgttgcaccttgttgtctggtgttgtggactcttgccctgaagaggacttctttgtcgctatccttagcctcatccaagtcaacaaacttgacacgcttctgaccagttctgtcagagtcacgagactggatcaatggcaacttaccgtagttgtcctttgcggtgtcttcggcagcggctttcttttcacgggcttctctttcagcttccaactggagagctctttcctccttctttctctgtttctcttgctctttctgcaatttcttcaaggccttcttggacaatggcttaccatcttccccaagaataacttgagcaggttctgcggattcttcaacagctttgacaatattttcgtcttgagacatcacgtaaaatgtttctttttttcttttacaattaaccttaagaggccgttccagccaatgatcgaaaacttaaacaaatcggttgtcttgcttcatccttatatgacattaaataatttttcatttcttcttttttcacgaaaatgcgtcataaggtactcgtcactgatgatttcatagacaataaagcaacagcacaacgtaaaagagttcttatggatgagtcccaatcctattgttttctgtagcctaatggtacaaaatgtgacggtaatagaatatatactttcataatatcataggaacatcttcagcttggcctgtctctttgagaaacaaaaactgcatgtgcacaattactgcagatgaacttcaaggaaacatatgtcctgcttggaggaccagaagcaaaccattctagctgtatttgcaacgcttttgtaccaaatgtacgttattatgttatgtcgtcagtgtagatatattagatttacatgcggctgtaccgcatcattggaaaataatgtctgcaggctcgcaaaatttaagggttcccttctacaatagtagtcaaaattgcttttttgcatataacaaagtgaaaaaaaaaaaaaatatgagagacatatctaaaagacatatataatctgccaccagaatgagttgcactgcgtcatatgccggcatgacaactccggtgaaggataaggaaggccacgggattccatgcttacaacctatcgatgtagtggaatgtacctatcaatattttacaaaatcacggaataaactgtctttaagggtaggcgatttgatttacgtactcactaaaggttctaatggctggtgggatggtgttcttatcagacacagcgctaataataataataattcgttgatactagacagaggttggttccccccttctttttacacggtccattctaaacgaactacacggggtgcctgacatcggtaatgaattggaaatatttcaagcgggtcttaatcttaaactggaattatcaagcaacccagtgatcttatcattggaagactttttagactgctgtcgcgatattgaattcaaggaacaactggcttggtcacctactcccgtccacgaaaggaaaggctgctgtgagctgctgtactataaccaggatttagatgtttattgtcgcacgttaccatatttaccacaaaatcaagttgaaaccgtgaacgactattcgtcttttcctgcaatatcgaagatagctggtaaaaagatgcctataacgtcaagccccgatctgttctatctcaatgattgtgatgtcgtctattggtatgacctcactcgcttagtgtgtcattatgttaatttaacagagcgcgacctattggcaaatgaacgggaaaagtttctaacttccttggatttattaacagctcaaataacctatgtttatatgcttttcaggaatctccgtttagttgaagatagtttcaaaaaaaccctcaaaaaactaatttacaccttgtctaggttttcaataaatgcaaatatttggtttcattccacattgtttgaagaaagagaagccatagcctcccagaaggatccagaaagaagatcccctcttctacagtcaatcctaggaaccttccaaaaatttcattttctactgcgtttactacatttcctctcaaatcctaacgaacttacaatactgcctcaattgactcctcgatttttcaaggattctttcaatacaatttcatggaataacccgtttttgcgtaagcgtctcaaccagcatatgtcccatgacctaccgagacagatgattaaagccgttgctggtgcttcaggaattgttgcggaaaatattgatgaaattccagcttccaaacagggcacttcatgctcgtcagaaacgtctcaccattcaccatcagccccgtttcaaagaaggagaagaggtaccattttctctaatgtgtcaggaagttccgatgagtctgacaccatatggtccaaaaggaaaaaaccatacccgctaaatgaagaaactctaagccttgtaagggccaggaagaagcagcttgatggtaaactaaaacaaatgatcaaaagtgctaatgaatatctcagtaacacggctaatttttcaaaaatgttgaattttgaaatgaatttcaaaacctacgaagaagtaagcggaacaattcctataattgatattctggaaaacctagatttaactatttttctaaacttgagagagttgggagatgagaatagagtttttgacgaagatgtcgctattgatgatgaagatgaagagtttttgaaacattctttatcatccctatcgtatatcttatccgactattttaatatgaagcaatattttcatgatgtagtagtgaaatttataattgtcgcccagcatttgacattagaggatcctttcgttttctcgccaatgcaaaacgacttgcctaccggttattatgaaccaatgaaaccttcatccttgaatttagataatgccaaggataagaagaatgggagccaaaatactgatatccaagaggaggaagatgaatatgagccagacccggatagtcttattctcttccacaacctcatcaatcaagattctgatttcaatgatttaaagttttttaatctcgcccacgtttttaaaaaatcctgtgatgactattttgatgtgcttaaactagccattgagttcgtgaatcaattaattctagaaagagagaatttgttaaattatgctgctagaatgatgaaaaacaatatcacggaattgctattgcgcggggaagaaggctatgggtcctatgacggcggtgaaactgccgaaaaaagtgacacgaatgctgtttatgcagattcagatactaaagacaatgacgaatggcgtgacagccaagtcaaattaccgaggtatttgcagcgcgagtatgacagtgaactgatttggggctctaacaataggattaaaggtggttctaaacacgcactgatctcttacttgacagataatgaaaagaaggatctatttttcgatattacttttttaatcactttcagaagcatctttactacaacggagtttttaagctacttgatttcgcaatataatttggatccaccagaggatttgtgctttgaagaatacaatgaatgggtgacgaaaaagcttataccggttaaatgtagggtggttgagattatgacaacctttttcaagcaatattggttcctgggctatgatgagcccgatcttgcgaccctaaatctggattattttgcgcaagtagcaatcaaggaaaatataacaggatctgtggaattactaaaggaggtcaatcagaagtttaaacatggtaatatacaagaagcgactgcaccaatgaaaacgttagatcaacagatctgccaggaccattactcgggcactttatactctaccacggaatccattttggccgtcgatccagttttatttgccactcaattaacgatactagagcatgaaatttattgtgagataaccatttttgattgtttacaaaaaatttggaagaacaagtatacaaaatcgtatggggcttcaccgggtttgaacgagtttatcagttttgccaataaactgacaaatttcatatcctactctgttgtaaaggaggctgataaaagtaagcgcgccaagctactctctcattttatttttatcgcagaatattgtaggaaattcaataacttttcttccatgactgcaatcatttcagcattatattcttcaccaatttatcgtttagagaaaacctggcaggcagttattcctcaaacgagagatctattgcagtcactgaacaagttgatggatcccaagaaaaatttcataaattacagaaacgagctgaaatctttacatagcgctccctgcgtaccgtttttcggcgtttatttatctgatctaacctttactgattccggaaatccggattatcttgtcttggaacatggtttaaagggtgtccatgatgagaagaaatatataaacttcaacaaaaggagcagacttgttgatatcttacaagagatcatatatttcaagaaaacacattatgatttcactaaagatcggacggtaattgaatgtatatcaaattcattggaaaacatcccccatattgagaaacaataccaattatcattaattattgaaccaaaaccaagaaagaaagtcgttccgaattccaattcgaataataaatcacaagaaaaatccagggatgaccaaaccgatgaaggaaaaacatccactaagaaagacagatttccaaaatttcaattacataagacaaagaaaaaagctcccaaggtttctaagtaacggcgccgtatgttcgatttccttctctcggtggattaattattttgtttgttttctcctgttatattatttattgatcactatagtaaactatgtccgtcatcaagcccgacggctgctatcccacaatgttgatcgtattgtttgcctagtttattatatatttgcttatttatagcataccataatatttaaatgccctcaaatttttggccgtagcgacatcgcgataattccaattccctttaaaaaattgcgcctgagtataagttaattcagccagttctccaaattaaaatcgcatactcctgaacctatcaacagattgtcctcgcatacttttctataccaaggtctcttctgaacatatattagcagtggttaattttaaagagatcataaagaaaattttgtctaaaaaagattaatataaagacaatgtcttcactagaagtggtagatgggtgcccctatggataccgaccatatccagatagtggcacaaatgcattaaatccatgttttatatcagtaatatccgcctggcaagccgtctttttcctattgattggtagctatcaattgtggaaactttataagaacaataaagtaccacccagatttaagaactttcctacattaccaagtaaaatcaacagtcgacatctaacgcatttgaccaatgtttgctttcagtccacgcttataatttgtgaactggccttggtatcccaatctagcgatagggtttatccatttatactaaagaaggctctgtacttgaatctccttttcaatttgggtatttctctccctactcaatacttagcttattttaaaagtacattttcaatgggcaaccagcttttctattacatgtttcaaattcttctacagctcttcttgatattgcagaggtactatcatggttctagtaacgaaaggcttactgttattagcggacaaactgctatgattttagaagtgctccttcttttcaattctgtggcaatttttatttatgatctatgcatttttgagccaattaacgaattatctgaatactacaagaaaaatgggtggtatccccccgttcatgtactatcctatattacatttatctggatgaacaaactgattgtggaaacttaccgtaacaagaaaatcaaagatcctaaccagttaccattgccgccagtagatctgaatattaagtcgataagtaaggaatttaaggctaactgggaattggaaaaatggttgaatagaaattctctttggagggccatttggaagtcatttggtaggactatttctgtggctatgctgtatgaaacgacatctgatttactttctgtagtacagccccagtttctacggatattcatagatggtttgaacccggaaacatcttctaaatatcctcctttaaatggtgtatttattgctctaacccttttcgtaatcagcgtggtttctgtgttcctcaccaatcaattttatattggaatttttgaggctggtttggggataagaggctctttagcttctttagtgtatcagaagtccttaagattgacgctagcagagcgtaacgaaaaatctactggtgacatcttaaatttgatgtctgtggatgtgttaaggatccagcggtttttcgaaaatgcccaaaccattattggcgctcctattcagattattgttgtattaacttccctgtactggttgctaggaaaggctgttattggagggttggttactatggctattatgatgcctatcaatgccttcttatctagaaaggtaaaaaagctatcaaaaactcaaatgaagtataaggacatgagaatcaagactattacagagcttttgaatgctataaaatctattaaattatacgcctgggaggaacctatgatggcaagattgaatcatgttcgtaatgatatggagttgaaaaattttcggaaaattggtatagtgagcaatctgatatattttgcgtggaattgtgtacctttaatggtgacatgttccacatttggcttattttctttatttagtgattctccgttatctcctgccattgtcttcccttcattatctttatttaatattttgaacagtgccatctattccgttccatccatgataaataccattatagagacaagcgtttctatggaaagattaaagtcattcctacttagtgacgaaattgatgattcgttcatcgaacgtattgatccttcagcggatgaaagagcgttacctgctatagagatgaataatattacatttttatggaaatcaaaagaagtattaacatctagccaatctggagataatttgaggacagatgaagagtctattatcggatcttctcaaattgcgttgaagaatatcgatcattttgaagcaaaaaggggtgatttagtttgtgttgttggtcgggtaggagctggtaaatcaacatttttgaaggcaattcttggtcaacttccttgcatgagtggttctagggactcgataccacctaaactgatcattagatcatcgtctgtagcctactgttcacaagaatcctggataatgaacgcatctgtaagagaaaacattctatttggtcacaagttcgaccaagattattatgacctcactattaaagcatgtcaattgctacccgatttgaaaatactaccagatggtgatgaaactttggtaggtgaaaagggcatttccctatcaggcggtcagaaggcccgtctttcattagccagagcggtgtactcgagagcagatatttatttgttggatgacattttatctgctgttgatgcagaagttagtaaaaatattattgaatatgttttgatcggaaagacggctttattaaaaaataaaacaattattttaactaccaatactgtatcaattttaaaacattcgcagatgatatatgcgctagaaaacggtgaaattgttgaacaagggaattatgaggatgtaatgaaccgtaagaacaatacttcaaaactgaaaaaattactagaggaatttgattctccgattgataatggaaatgaaagcgatgtccaaactgaacaccgatccgaaagtgaagtggatgaacctctgcagcttaaagtaactgaatcagaaactgaggatgaggttgttactgagagtgaattagaactaatcaaagccaattctagaagagcttctctagctacgctaagacctagaccctttgtgggagcacaattggattccgtgaagaaaacggcgcaaaaggccgagaagacagaggtgggaagagtcaaaacaaagatttatcttgcgtatattaaggcttgtggagttttaggtgttgttttatttttcttgtttatgatattaacaagggttttcgacttagcagagaatttttggttaaagtactggtcagaatctaatgaaaaaaatggttcaaatgaaagggtttggatgtttgttggtgtgtattccttaatcggagtagcatcggccgcattcaataatttacggagtattatgatgctactgtattgttctattaggggttctaagaaactgcatgaaagcatggccaaatctgtaattagaagtcctatgactttctttgagactacaccagttggaaggatcataaacaggttctcatctgatatggatgcagtggacagtaatctacagtacattttctccttttttttcaaatcaatactaacctatttggttactgttatattagtcgggtacaatatgccatggtttttagtgttcaatatgtttttggtggttatctatatttactatcaaacattttacattgtgctatctagggagctaaaaagattgatcagtatatcttactctccgattatgtccttaatgagtgagagcttgaacggttattctattattgatgcatacgatcattttgagagattcatctatctaaattatgaaaaaatccaatacaacgttgattttgtcttcaactttagatcaacgaatagatggttatccgtgagattgcaaactattggtgctacaattgttttggctactgcaatcttagcactagcaacaatgaatactaaaaggcaactaagttcgggtatggttggtctactaatgagctattcattagaggttacaggttcattgacttggattgtaaggacaactgtgacgattgaaaccaacattgtatcagtggagagaattgttgagtactgcgaattaccacctgaagcacagtccattaaccctgaaaagaggccagatgaaaattggccatcaaagggtggtattgaattcaaaaactattccacaaaatacagagaaaatttggatccagtgctgaataatattaacgtgaagattgagccatgtgaaaaggttgggattgttggcagaacaggtgcagggaagtctacactgagcctggcattatttagaatactagaacctaccgaaggtaaaattattattgacggcattgatatatccgacataggtctgttcgatttaagaagccatttggcaattattcctcaggatgcacaagcttttgaaggtacagtaaagaccaatttggaccctttcaatcgttattcagaagatgaacttaaaagggctgttgagcaggcacatttaaagcctcatctggaaaaaatgctgcacagtaaaccaagaggtgatgattctaatgaagaggatggcaatgttaatgatattctggatgtcaagattaatgagaacggtagtaacttgtcagtggggcaaagacaactactatgtttggcaagagcgctgctaaaccgttccaaaatattggtccttgatgaagcaacggcttctgtggatatggaaaccgataaaattatccaagacactataagaagagaatttaaggaccgtaccatcttaacaattgcacatcgtatcgacactgtattggacagtgataagataattgttcttgaccagggtagtgtgagggaattcgattcaccctcgaaattgttatccgataaaacgtctattttttacagtctttgtgagaaaggtgggtatttgaaataatgacattgattattatatatgaagatatagaacatttaatgcgctgcaatatgtacggtcacgccaattctttttctttctatatgctttctagtaacccgggtaatcacaaatgaagctagtagagatataactaaatacaacttaattttaaccttatgttggattgctcaagcagtgttcgagaaagacagcggcagacagatagaaatgagctcaaatgaagaggtatttactcagataaacgcaactgcgaatgtggttgataataagaagcgtttacttttcgtgcaagatagctcagcacttgttctagggcttgttgcaggatttttgcaaatcgagtcagtccatgggtttatttggttcctgattctgtacaacttgattaatgtcatttacattgtttggatctgtcaacttcaaccaggaaagttctaccaaagcccacttcatgacatttttttcgaatcgttttttagagagataactggttttgtcatggcatggacatttggatacgccctaatcggatgaacatataagaactacttctataaacggttagaaacaggcttgatttattatgtacagtaaatataatgttatttgtgttttttttttttaaatttttttagttccttctatgtaaaaagacatgacaacagtattctcagtcaaatgatttcaaatacacaatgttaaattctctatctgttgcagaaataagaagagcgtaagagcgcaaagatttttgcagaaaaatagagatgaggtacaaaaagtaggtaatggaaaaaagcaaataatgaatataggggaacataaatgttatggacaagagtagatatcaaaataaaacaaaataaaatagagtaagtgaaagacaaatggaggaaaaaaaaaaaaaaaaaaaaaaaaaaaaaatagtaaaaagtgaaaggagaacgatgataacactaatcacacctccgcattttcaaccaatgctgcaagtttctcaacactggctaaatgtctatttcctagggagttagatttgtttagtttatccaaatatgctctaatggcaatgacgatcaatttcttaccctcaccctcagagacattaactaatttttgaatcacatagttggcaaattgatccttgatcattaaaatcattggagaatcgtcttccagattcaaagcatgatttttgtctcttggtaaaatcttagaaattattaaatccttctgatttttagagccataaagaatagatttttcgaccacgttggaggcaaatttatgtttagagtattcgacaacattattggccacagtttctatgatttcctgtttgatatcgaccatttccttattggtgaactgatcttgttgcaaaacatattgaatgacatagttaccatattggtcttgaattagatatggtatgaaatctttcaattcgtttaaaatgctttcctgatcttcgctcgaaccaaattctaacaatctttgaatgaccctacagccgtaggagtgggtagatagatggtaaatgtggccagttaaagaacttaagataaaaggtaatttttcgataggaattgtttcgatggccttttgaattacgtgattaccgttctgatctttgatcatttgcaaaacggagtcagataattccaggactaactcaattctttgattggaatcaatatattctaacgccttttgaattacacgacatgcgtacatttgtagagataactgtttcatgttacctttaaattgatcaaccaaagtatttttttgaattttgctaccaaattcaaaaaacttctgaatgacgtaattaccaaatacatcgttcgaaagctcaatggcgtcatcgcgaatttcattgaatatgacctccttttctgaggctggtgaggtggccaactcgcgctgaatgaaccgtgaaccatgttgatctttgcaaaactctaaggaatggccaaagatgtcttttagtgacatgttcgagtttgaatttttgtcagaactactgtttcttagttgctctaacaacggcgatcgatgatacgtttgctgctgttgctgtagactttgagaatgaggatgagaatgagagtgagatttatggttgttggccgttgactcattagatttggaagaagcattctttttagaggtattctttgtgggtatagaattttctagataaggatttgcctgtttgttggcgttgttggagttatttgcaggatgattcttgttatttcttttcttgaaggttttttcgtccttgggcattttgacaggtataggatttggagtagggtagtaaatataaggattctcctgttgctgttgctgttgttggtcttcttgttgttgttgttgttgctgttgctgttgttgctggggagcagagagtggtggaggtggcataaacatcattgggttggggtaggcaaacgggaacggagaattgtttggaggggacgaaggtgaagaaacagaagaaggtctgtttgccttcttctttttcttaccatttgagtcttcggtgtcttcatttgctggaatctgtactgaaatcatctgggagatgaaatttgaaggagatccgatcaagtagttggggaagttttggtaatgagggccctgatgaaactgattgggtgggaagccgttcatgtagggggggaaattgttatttgcaggcccatcttgttggttaggaagcgcgacatttgtggccccaacagcggctggattgttactaggtctaaatactggtgtgttggctacgttccagatatttctcttggggtaatgagcattttcggactctaaagacgcagatgagcctgaatttgaactggagtggtaaagcgaaccactgttagtagtgttcctattcaatttgttgaagtttttgtcagactcgacattttgctcgaaagtattctgtgtgtctaagctggcgttagagacgctttttgatatgaattgggactgagtattgacagcgtcgggtctatcttgagattccagttcccttgtaccgtcaatcaaagattttccgaacttctcaaaaaacccttccccaccagagttgttgttgtcattgccattgtagtaaacgggaccagcaatggaagctgaatactggcccagaagatggttgaccttgttgtttttcccgagattagccgcagtatgatgagtatgatagttattgtacgatgcggatgacagggaggcagtgtcggttgatctgtactggtaataattgccgccgttaccaaaaaactttttcgagttcgtggagaatggcggagcagtaccaactgatagggcggttttcttgaagatcggtgaagattcactggaaccgtgaagcagcaagatctctgaatctacttcatttgccgtggtgaaactcgaccttctgaagccgccaatttgctgtgatccagcagcaccgccgttcacaatgccggccgcggcggcctgaccgccgttgttgttactatgggacagggcgcttaaagaagaaactatggatgcgagttccatatccatatccatatccatgttcatttccatttatacccgcaatattgcgttattcagaagaaatttaaatgcgtagttcttgtttgttttcttgtttgcttgcgtacttctatgcttatagatatatcagtagcaaggaagtttccttttcaccgcctttcaatgttcctatctttttcttatgtttctctttagagaccagatgaccagaaaaaaattagctaagcagtgttatactatttacagtagatattcaaatatgtgcaggcaccacttatttttctttttccttcttttctttgtttttttttttctcctattcatcaagcttcatacatccaatatacattctcaagtgtgctaatggtacatttgggaaattatcttcctctctccacaatttttagaaggaaaaaagaaatgcagttcagggtaacagagtgcgcaattaccgtagatagcgatcggatgtttatctttagccctctttttctagctcaaaccccggcacgaattttttaggtcttgctgctctgccctcgggcacttttcttcgagaagttctggggcggtctgatcgggaaaaaacgttcccttttcggacgtatcgcaggcaatgtgcaaaagcttattatatacgagaaaagaaacgcgaaggaacgaaagaagatgaaaaaaatgcagcgataaaatgatattgtggttaatctaaatttatatatatatatatatatacatatatatatagaaatctattgttatacacaaaaatacttattttttaatatagatggctgcagataaagtaatagttttatatataggtatatttactgcacaattcacacgatgggtgtttctgcggtgttgaaaagagctaggaatttactagcaacgttcatagtctgctgttttatggcagtagtgcttgttctggcgctggcacaccattttataaatgagcacagagacactaggagttcatcgacccaaatcgaagttgatgacgaaagtaaaagaaacgtacaccatgaccatgttctcactagaaccaatgcatacgcgacgccatacctcgatctggaacatgacaagaaaaacggtatcgtctacgatcatacaagaacggttgtccgtaaaaagaaccacgaagtggggtcctcgtcactgcataaaaacctttttcacaaatttttgacaaagcttatttttaggtttatcgagaaggaaaaagttaccgaaggcgtaacgcaaggaaagttcaataatagtagcaatgaaattgccaatcatgaaccggtttttgaaaaaattcctgtacagtgcgacaatccattacagaatctaatcttatcggaagacttgacattagttgcggatcttaattattattttaaccagtacaatattcaaatagaggaatttagattggagaccgaagatgggtttgttatagatttgtggcacttgataccaaaatatagaacgacagattctgacaagaagaagaggccacccattttgatgctacatggccttttgcaaagcagtggttcgttcgcatccaatggtagaaaatctctggcatattttctgtatcaatccggttacgacatatggttagggaataacagatgcgggtttaggccggaatggaacgaagcgaaagtaccgacactagcttccaggtgggactgggaccttcgcgagatggttaagtacgatctgacccttttgattgataccgtgttagctaagacgcagtttgaaaagcttactttgatctcgcattctcagggcactacacaggggtttatgggcttggtcaacgaagataagtttttccctcccggttcgggatctaaagaatcttttttcacttctaagatcgcaaactatattgccttggcccccgcagtgtatcctggtcccttacttaacgagaaattgtttgttaagcttatgacaaaggaaatcgaaaatccctggttctttggtgaaacgagcttttttgagataatgatgattgtaagaaacttgtgcgttggtgagagcttgttctcctttgtttgttacaccatcttcaattacctgtttgattggaacgataccctttgggataccgcattaagagatcgccatttcctgttttcgccagtccatgtttcagtgaagttgatgcaatggtggctgtcacccgaccccaacaaggtaagttttaaatttggttcccataagatgttccccgacaatgttaagtggttttcagacgcatcaaaggccccaaatatctacttgtttgttccaaagcaagatagattggtggacggagaaagactaatcaatcatttcgtcaatgtggagtcgaatgtcaactacaagatctggtacattgatgagtatgcccatattgatgtcctatgggcacatgatgtcatagagagaattggtaaaccaattttacagaatttgaacaactattactccaagaagccatccagcgcctttgaaagtgattgttcggacacagaggtggaaacggagctggaaatggttgctgagaaggcttgaagaggaagcatgatatataggttaatataaattatacttgggaatacatagatagagggctagtaaatttttagtttttaattgttctttttttttgaagtattgtgtcacaaattgtcgggagttgggacatcaccgtgcataacgatacatttttttgaaaaatttgatattgaaaaaaaatcgatgagtttgaattacattacagttgtataaagcaaccgcatttcattaacgtagtttgactcgcgaagataaggcgttaaaatgaagattaagaccattaaaagaagtgctgatgactatgtccctgttaaaagtacgcaggaatctcaaatgcccaggaatttgaaccctgaattgcatccttttgaaagggcacgtgaatatactaaagctttgaatgccaccaaattggaaagaatgtttgctaaaccctttgtgggtcagttaggatacggtcatagagatggtgtttatgctattgccaaaaattatggtagtctgaataaattggctactggttctgcagatggtgtgattaaatactggaacatgtctactagagaagaatttgtttcctttaaggcgcattatggactcgttactggtctttgtgtgacacagcctcgttttcatgacaagaagccagatttgaagagccaaaattttatgttatcttgcagtgatgacaaaactgtcaagctatggtcaataaatgttgatgattactccaataaaaactccagtgataacgactccgttactaacgaggaaggtttgattcgtacttttgacggtgaatctgcatttcaaggtatcgattcgcacagagaaaactccacgtttgccacaggtggggccaagatccatctttgggacgttaacagattgaagccagtttccgatctatcatggggagcagacaacattactagtttaaaattcaatcaaaatgaaacagatatcttggccagtactggtagtgataattctattgttctttacgacttgagaaccaactcccccacacaaaagattgttcaaacaatgaggacgaatgctatttgctggaatccaatggaggccttcaactttgtaactgccaatgaagatcataacgcctactattatgatatgaggaatttatcacgttcattgaatgtattcaaagatcacgtcagcgcagtaatggatgttgacttttctcctacgggggatgagattgttactggttcgtacgataagagtatcagaatatataagacgaatcacggacattcgagagaaatttatcatacgaagagaatgcagcatgttttccaggttaaatattccatggattctaaatatattatcagtggatctgatgatgggaatgttaggctatggagaagtaaagcttgggagaggtctaatgtcaaaactactcgtgaaaagaataaattagaatatgacgaaaaattaaaagaaagatttagacatatgccggagatcaaaagaatcagtagacatagacacgtgccacaagtcatcaaaaaggctcaggaaattaagaacattgagttgagttctattaagagaagagaagctaatgaaaggcgtactagaaaggatatgccatacatttccgaaaggaagaaacaaatcgttggtaccgtgcacaaatatgaagattcaggaagagataggaaaagaagaaaggaagatgacaaacgtgatactcaagaaaagtagttattctgttttatgttgtctgtatatacacatatgtacaatatttgcatttttttaatttttaattcacatgtatttgataaatgttcacgccagtcccgttaaattaaaattaccattttattagattatgaatttatatatgaatacattgtgtcgtaatggtagaagaagttgaaaaaaaaaatgtcaagggacagcatgggtacagtgtgttgagccaaaaaaaaaaagaaaaaaaaagaaaaaactttttgttctctggttcttttcttcatcttcttcatcttcattctttggtagcgggggccacaagaaattcgggcgaaagtgctcattatattgttacatccaaaattttgcccacatccagtgaggttttcacagaaaggtcttctaaaagaggaataatatctaataattcgttatcatgagtatctgagaaccaggacgaaatcggtattgcatgttggggatgaaaaatataagatgccggagagttatcgagaatgatgatatctgataacggccttccaatctgggataagttttttatatagtttccttcatagttatagcaagcctctctgaataatctgtgatgaatgactttatctgtgtctaatatatcaagcaaaggatcaccgtatcgagagacactagccgtgaagactacaacctcgaataattttccgactctttccaaaaattcttccacaccaggtcttttaatgacatagacattgtgtacttggtcatctatttccacagacaaaacaaaatccgcagatcgtaagtatttgaaagaagagtgtaccaaggtttcatccaggtccagtattaggcatttcttgccctttgtactttcatcttgtggggggagcagagtgttgtaacctggtgcatgatactggccctgctgcaaaagcgttagatcaatatattcttcatcttcatcgtcttcgtcgtcggcatcgttggaagtttcactggcttgagagctgctacttaccctactcaaattcatatcttggataagatggtcagacgatacttgtacagtaggccctcgctgctgcgactgcgactgcgactgtgactgtgactgtgactggggttgtggttgtggttgtgactgttgttgttgttgctgctgttgttttttctgcctggaagtatctttcacagcatctcctttttcctgtacaatgccacgactgcgacggttatcttcatcgtcgatctcttcatcttcgtcaacctcgtatttttcctcgtaaagatcatctttactaattcgcttctctacttttgtcatattattagtagtagtggcggtgacggctgcagtcggcgacgatggcttctttttttcattatcgttcgtgcttatcccagatttaccggtggatcgttcagtggaactgaaagtagcggctgaatttgtcttagaaggaggagagtttgtctgatgtacgccacgggttcggcttttcgtgttggaatgtttaacgcttctgtttttattgagagaactgctctgttgttggcgataagcagaattggaattggattgtgtcgtctcggaagagcagcacagtattgacgatatgaaacccatactgttttgctacttattgttgttaaagcttacgaacacgaatgtaggcaaataaaaagcttggataaacgcacaatgaaaggggaagtgcgattgattatgctataaggaatgacacgaagagagcagactataggctaggcaggcgataaaggaaggagttgtacttgacgacaacgtaataaagagttcaatgaaagagtattgtgagcagtatggttcaacgagcacttcttctcgacacctatttctatactttttcacttaatatacactaactaatcccagacttttttttttttccgttctttccagaaaaaaaagaaacaaagcaagcgtgccctgacttagggtttcctaaaaaagttattaggtttgtgtcacgtgatacgtccttttctggtcacgtggtcttagaacactcttaaggggccaagcacaagaggacagtgctagcagtagaagtggtgtagtagtgatgaggtaatgttaattgtgcatcgcacatatttacaggtagtatatactatagtttgtgaatacctattcttatatatacaagaaatggttgtcggcagactgtcagtaagactaatttgcacttggaacttcgaagccataacccttcatgcactctttgtacttttcaatgaattccttgcatttttcagagtcttgtccattgaataagatgcatgtatcccgctcctccttttctggcttacaaacgcaacatggcttaggtttgtcctcgcactccgcgtggttttcttgttcttgtttcttgtcagtttcagtcattgggtataattgattgtgtagttatctgattgtgtacactaaaattttgtttagttgtactagagacaagtagttaggtggttactagattctgattcgccgctatatatcgtcattttatctttttttgaaggagataggtagggttataacattatccgggtaatgatttgaaaaaaaattttcaaaaaatgcgatgagatgaggttgaaaattgtaagttagaatatgcttagatagtatgagtatttacgttggtaacttgggtttcgaattggagctgtgtgcctacaacagcgtcttatatatatactatggtggtaggaactaaaaaatactctaatttggactttgtccctacaatcagtgacagtgaagacgatgttccaattctagattcttctgatgacgaaaaagtcgaggctaagaagactacgaagaagcggaagggtaagaataacaagaaaaaggttagtgagggggataacctcgatgaggatgttcatgaggacttggacgcggggtttaagtttgatttggacgccgatgataccacttcgaacttccaaggctggaactttctagcagagggcgagtccaataaggacgatgccgaagcttttgtgaagaaggacgttgacttggataagattattagaagaaaaggtgggctggtgaaaatggcccatattgatagtaaacaagaagaagaaaccgagaaagaaaaagtagaaaaagaaaacgatagcgacgatgaggaattagcaatggacgggttcggtatgggagctcccatgaacaatggagacgaaaatcagtcagaagaagaagaagaagaggaggaaaaggaagaggaagaggaggaagaggaggaacaagaagagatgacgttagaaaaaggcggcaaagatgacgaaatagatgaagaagacgattctgaagaggcaaaagccgatttctatgcgcctgaaactgagggagatgaagctaaaaagcaaatgtacgaaaatttcaacagtttgtctttatctcgtccggttcttaagggccttgcaagtttgggttacgtcaagccttcccctattcaaagcgccacaatccccattgccttattgggtaaagacatcattgccggtgctgtgactggttccggtaagactgctgcgtttatgattcccataatcgagcgtttgttgtataaaccagccaaaatcgcttccaccagagttattgttctattgcccactcgtgagttagctatccaagtcgctgacgttggtaaacaaattgcacgtttcgtctccggtataacctttggtctggccgttggtggtttgaacttgagacaacaagaacaaatgttgaaatctcgtccggacatcgtcattgctaccccaggtagattcattgatcatatcaggaactcagcaagttttaatgtggactcagtagagattctggttatggatgaagccgatagaatgttagaagaaggttttcaagatgaactgaacgaaattatgggcctattaccaagcaatagacagaacctattgttttctgctacaatgaactccaaaattaaaagtttagttagtctttctctaaaaaaaccagtaaggattatgattgatcctccaaagaaagctgctactaagttgacacaagaattcgttcgtattcgtaaaagagaccatttgaagcctgccttgttatttaatttgattaggaaattggatccaacgggtcaaaagaggattgtcgtttttgtggctagaaaagaaactgctcataggttaaggattatcatgggtcttttaggtatgagtgtgggtgaattacacggttctttaacccaagaacagcgtttagattccgttaataaattcaaaaatttggaagttcctgtacttatctgtacggatttggcctccagaggtcttgatatccccaagattgaggttgttatcaactacgatatgcccaagagttatgagatctacctgcatagagttggtcgtaccgccagagctggtagggaaggtcgttccgtcaccttcgtcggtgaatcatctcaagatagaagtattgtacgtgctgctataaagagtgtagaagaaaataagtccctaactcaaggtaaagcacttggtagaaacgtagactgggttcaaatcgaagaaacaaacaaacttgttgaatccatgaacgatacgattgaagatattctggtggaagaaaaggaggagaaggaaatattaagggctgaaatgcaattaagaaagggtgaaaatatgttgaagcataaaaaggaaatccaggcaagaccaagaaggacatggttccaaagcgaatcagataagaaaaattccaaagtattaggtgctttatcaaggaacaagaaagtcactaacagcaaaaagagaaagcgtgaagaagctaaggcagatggcaatggtgcacgttcttatagaaaaaccaaaaccgaccgtattgcagatcaagaaagaacttttaaaaagcagaagagtacaaattcaaataagaagaagggcttcaaaagccgtaggtaataattttcatcgtcattatcataaaatatcaacatacttatcactgtcattatattattaatactttgtatttaaatatcattaattcatctaataaacaggggattagtcaaaaattcctttttttttgttgaatctgtagaagtgagtattaataaactgcaagctatatgctatattaaaaggatttttcaagtacaaacgaactgaatggagactcaagctacttgcgggaaagaattacaaaattacattccattctagtaaaaaaaagttataaataaaaaaaaatcgtctgacgacaaatttgtatcttaatcaaaataaaaattttgggttactttctttaacgtttccaagttataaaattcttcatcttcgtcctcgtcgcttggttcaggtggaggcactatgatgtcctgacgaacgttcaaatttatcatctgaacatttttcctcaaatcaaataaagtgtctatttgttctttcgtgtcttctgatatatcttcatgctggaatggagatatcaatttcaatccgtctagccatatatatcttccctcttctgtgtctaaataaaatttcaaaactgtcctgtcgttacgatcttttaattcaactccagtgtacacattggcttcatctaatttgatgtaaacattactgctcgtccgacgactcggtgtagtaagttctatgcttttgaaagaggttatatgtttcaaaacaacaacttttgttctgccattagctaatgcctcagaacctggacttgttaaaattttattgtcgaatagataaggtaaatcgtttgtttgtgtttcgaattctctggctaataaatttgcgtggttatctgaaactatgaggaagtagactttaggcgtgccagcttcaggattcagtgggttctctgcgtaaacccacgttcccttttgcaattgaagaagtctttgatgacgaacgtaatcacgaacctggcctgatagcatggtatcgaagctagcgatactagatgaccaggttcgatactgttcttttttgattgagtctaattgtaatgttcttgcaaatttatatctcatagagtcaagtgcaacaacttgggtcttgagaagggatttcgtctgtattgctgcttccaaatcactggatgacaaacaaacatattttaaagtgataatagctaaatttaacagtgaaaccaaatcactttgcgattttgctaatgattctatccaaaatctcaaaaacaactcgagtgttttgtaaaaacatgtttgtcgattgagaacagcggtagcaatttgtaattttaaatcacgctctgagtctgagtattggttctcttttttcccacttagattgaaaagtcttctaaattggtctgaaagtttaaatattgcttcataaagagggaaatcgttctcgccaaacaacaattgttcagtgtaaagtctcttgaaagacccattaggactgtttaagaatgtgaatgtatcatacgcatttaataaatttatactgggaagatcgcccatttccatttctaaccctttttggaatacggagttatctttgatggctgtaagaagatcagctttaagcgaacaggaataatcatcaatactaaccgaagatagaaaatttattagcctctgctttaacggtacaaattcttcaaggattagtggttgcaagtcttctatgtaaagtaattcagacatggaagctggaaagttatactgaaatagcaaaatgaggattctgggtacaaattctacggcgtgtgatagtgatgtctcacataatgtaagtgagcattttaaaaatagggttatgcatagtatagtgtccgtaaacaacggtatatgaataggtctttgggacaaaagttgtaaaagtattccaatgagctgagagttctctctggagatgtggcagatgctcacaataacttcattcttattagaatcttggcatttaagggctacattaaaaatcctaatgagatttgctaccaacgtttctgaccttagcttttggcaattatcacacaatatagcccaaaatcgggaatctggaattacggttttacataggtatttttcatcacaaaggaggatatagtttgccaataacttttcgtattcatcacttgtcttgttcaaatttttattactgatcagcgtatgatagcaagcttttgattgtgcactcgtaagtgacttgactggctttcctaatttaggattcagtagcacttttatgttttccaagctttcatctggcatctgcctgttatgcttcattgcttatgccgttatttgaggttactttaatctattttcctactgatgacacaattgagtcaatccaacgtggaacgggttgcccttgtatacatttcagtttacttcttttcatgtatttccttaatagtttattttttcactttctgcctatccgtttcaattccgaagaaccgtcaacatccaataaagatcatctacaacaataagtgcccctcataattttctcaatgagatgaaagaactttgagagagtcaatataatacctgtagcctttttctgaaaatgactgatagtgagaatgaatccaccgaaacggattcgttaatgacgtttgacgattatataagcaaagagctacctgaacatttacagagactaatcatggagaatttgaagggttctactactaatgacttaaagcaaacttcaaacaactcagagtttaatgtcagtaaaaacgggagcttcaaaggtctcgatgatgcaattcaagctttgcaaatgcaaagcgtgttgcatccttcttcgttaggatcgttagcaacgtcctccaaattttctggatggtcgtttgctcaagggttttttgtaggacagctaagcatagtgttgttgttcatctttttcctaaagttctttatattcagtgatgagccatctaaaagtaagaatccgaaacctgcagcctcccgtcacagatcaaaatttaaagaatatccctttatatctcgcgaattcctgacttctcttgttaggaagggtgctaaacaacactacgagctcaatgaagaggcagaaaatgaacatcttcaagaactagctcttattttagagaaaacctattataatgtcgacgtgcaccctgcagagtcattggactggttcaacgttttagttgcccaaataatacagcaattccgcagtgaggcttggcacagggacaatatccttcattccttgaatgattttattggaagaaaatcacccgatctgcctgaatatttggataccataaaaataactgaactggatacaggtgatgatttccccattttctcgaattgcagaatacaatattcgccaaattcaggaaataaaaagctagaggctaaaattgatatagatttaaatgaccacttaactttaggagtagaaacaaaactattacttaactatccaaagcctggtattgccgcactccccataaatctagtagtgtcaattgtgaggtttcaggcgtgtttgaccgtatctttaactaatgcagaggagtttgcttctacttcgaacggtagcagtagtgaaaacggtatggagggcaattcaggatactttttgatgttttctttttctcctgaatatagaatggaatttgaaatcaagtcgctaattggctcacggtctaaacttgaaaatattcccaagatcggcagtgtcattgaataccaaataaaaaaatggttcgttgaacgatgcgttgaaccaagattccaatttgtcaggttaccaagtatgtggccacgtagtaaaaatacgagagaagaaaagcctacagagttataaatatttatgtacaaattttttgttctatctttttcctatcttctctgcctcatttttggtgttccagttttggttagtgcaagtggctattctccaagtgacaatcaccaaataaattcattgaatacatattaagatcgaatttcaggtgatacgacttctccaaaaatgattgttcttcttcagaaattcctagtttgtcccttggtagccaaatttcatccgaatttctacaaatggagaaaatatcatggaaagtataactttcttgacagaattggtccttcctttcctctgttagattcgacaagtattccaaagttggtatgcgttgaggcttcgattttatttgtttggagattttggagtgcgtgattactgttagagcaaagacaacaagcattatagttgacaatgtgtattgatcaaaaagagtgaacagcccgagtaaacaaaattccatgaaataaatgcccgcgtacaattgcataagggcctgtatgtacaatttaccgaacgtttcagaatagttctctttgttatattggtatttgaacaagtaactgaaagaaaagaaaaccatcgaaaatgagatgcaacataataataatataataggagcaacaacactgtatatgataccaatacagcccaacactgagaatataggataaatagatcctagttggaaaaataaagatgtctttaacctcttaaattgagcatgtggagtactccttttccatttatagtagaacaattcaaaaagtagctcttttattcttaacaaattaccgcctgcataagccattcccctaatcaaaacaaaagaacagaaaaagtttgcgcatttaggcaagtcgttggccaggagagcagggatactgacaggattgttaagaagcctctcaataattatagaaaatccagaagatattgtaacaactacgaaaagatgaatgaagacaaagacgaaataccaattctggacatcagcttctatttgcgctccagttttcaaccctcgaaggtaactcagccaacggaaaaagtagggtacgatttctattattattattaaggttactattggaatcaaattctttgccacttctcttataaatggagattggaaatgaattatttttgtaaacggtattagtgaggaaatatttggtatttgtgatattaacccaaggaacgcgacaggcaaaatccagcctataatcacaaaaattcgcaatatatttgccgagaaatatttggcacttttccaaaggggtgatgaatcgaggatatttctccaaataatgtcattaacattggggcctattattacttttaaattttgggtgggtagtctatacgaaagcaactcacctataacgtttgacaataatgtggacttgaaggtaatgaacatcttatccatataaatgtctgtgcccgacgataaatcgtcgggcagtgcctgcttggtttctgaagttgctttcaaggaatttacttggaatttaatgagtttttccttgcgtattattttatcaaggattctgtatttcctttctaatattgtttctgtatttacatacagtttagggtaatataacggaaagatgcttgactttttccagcgcagacgaatttttgtgcaatagtatgaaattctaaattgagttaaaaataccaattttttgtactgaaataatagatggtttttcaactttgaaaagaaaaatcttttgtgatttgctatcaaatgcctgtgtattgaaactcttctaaaatatttctctaaaataatctcaaagataatttgttcttttgatttttgtaatttatttaactttatttctaatttgtggactttcttcaaattttttggaatgaaatgcgtcacgccaaagcaatcactgtgtagcggctgaaaaaaagtttctaaagaaatactttgggtaaccaatttacttgagaatccttccaaatatagaatgttttggtatttacttttcgtcaaaacggaatatcctagtcgattaacgaacctcagttccgaagaaagaatgaagtgaaaccagagtacaacaaagatactcaaaaacaagtgacagattaaagtattcgatgaattaggtgatagatttgacatggtccacttgtcaagtttacttgtcgtcctgaaactttgctcataacgttcaccttcattttctttcaaaatatccctggaaaaataatggattggaattagtattggaatgttgataattgataacactgcaaaaaagaatatcaaaagtttgagaaaccgtaaaaatagataattgtctaggccatacctttcgtttcgttcgaatttttccataggatctaacattcttccgggaagttgcttgagaaatgcaaataatgaccaataattttttatttttttcttagcaaaacaaactttagaacctggatggattttcagaacgacattggcctgatatatagtcttgaatcttgatcttaaaataataaagagtgacagctgaaataaaaagtacaaaaaagaaaacaatataccagatatgaacccttttagtgagattccagcatgtctttgcgcagatccaaatctttctttgtcttgaaatttattcagtaaattaaaagtcagttctttagtagcattcatcttcttggtaagtctttttcttgtttttgaaaaagagttcctgaagtttgtctactgtgaatatactttgcacatttgtttaatttttaaacacgctataatttgtgtcataaagaattttttgtagaatagctttttttttaataggaaaaaaaaataaaaaaaggtggaaaagacaatcttttccagaaacttgaaactatactggagatgaagggttgtcgttggttgcgttacgagacaggcttgacaatttcacaagagtaatgtttcattacctgctgttttattatctttatatttagtaagaccagcagaaacgctacacgtgatgataatggaactaagcattctgttagatggtaagaattttttttaccttccattaccactaacgccttttttagtgtctttttgatatttactgacgtatttttccgcaccgtaatttgaagaaaaagaaaagtgacaaaagatggcattgtttacatacagagtcgtagtatcacaagagtagtccaacaggatgagcgaccttaaccaatccaaaaagatgaacgtcagcgagtttgctgacgcccaaaggagccactatacagtataccccagtttgcctcaaagtaacaaaaatgataaacacattccctttgtcaaacttctatcaggcaaagaatcggaagtgaacgtggaaaaaagatgggaattgtatcatcagttacattcccactttcatgatcaagtagatcatattatcgataatattgaagcagacttgaaagcagagatttcagaccttttatatagtgaaactactcagaaaaggcgatgctttaacactattttcctattaggttcagatagtacgacaaaaattgaacttaaagacgaatcttctcgctacaacgttttgattgaattgactccgaaagaatctccgaatgtaagaatgatgcttcgtaggtctatgtacaaactttacagcgcagctgatgcagaagaacatccaactatcaagtatgaagacattaacgatgaagatggcgattttaccgagcaaaacaatgatgtatcatacgatctgtcacttgtggaaaacttcaaaaggctttttggaaaagacttagcaatggtatttaattttaaagatgtagattctattaacttcaacacattggataacttcataattctattgaaaagtgccttcaagtatgaccatgttaaaataagtttaatctttaatattaatacaaacttgtcaaatattgagaaaaatttgagacaatcaaccatacgacttctgaagagaaattatcataaactagacgtgtcgagtaataaaggatttaagtacggaaaccaaatctttcaaagctttttggatacggttgatggcaaactaaatctttcagatcgttttgtggaattcattctcagcaagatggcaaataatactaatcacaacttacaattattgacgaagatgctggattattcgttgatgtcgtactttttccagaatgccttttcagtattcattgaccctgtaaatgttgattttttgaacgacgactacttaaaaatactgagcagatgtcctacattcatgttctttgtcgaaggtcttataaagcagcatgctcctgctgacgaaattctttcattattgacaaacaaaaacagaggcctagaagagttttttgttgagtttttggtaagagagaacccgattaacgggcatgctaagtttgttgctcgattcctcgaagaagaattgaatataaccaattttaatctgatagaattatatcataatttgcttattggcaaactagactcctatctagatcgttggtcagcatgtaaagagtataaggatcggcttcattttgaacccattgatacaatttttcaagagctatttactttggacaacagaagtggattacttacccagtcgattttcccttcttacaagtcaaatatcgaagataacttactaagttgggagcaggtgctgccttcgcttgataaagaaaattatgatactctttctggagatttggataaaataatggctccggtactgggtcagctattcaagctttatcgtgaggcgaatatgactatcaacatttacgatttctacattgcgttcagagaaacattaccaaaagaggaaatattaaatttcataagaaaagatccctccaacaccaaactcttagaactagcagaaacaccggacgcatttgacaaagtagcactaattttattcatgcaagcaatcttcgcctttgaaaacatgggtctcattaagtttcaaagcaccaagagttacgatctggtagaaaaatgtgtctggagaggaatttagataaagaatgcacggataaataagtaaataaataaccatacatatatagaaccatagaaccacgtttttgtaatgaacagtctacctgtatctcatcatttttctgtgttaactattattattattattatcgaatggagggtaatattatgtataggtaaaataaatagatagtgccatgatgcgcgaagattggcaatgggaaactcaagaaggcagcaacaaaaaaataaaggtggcctattaatcacaatctattgcctatatgtgctaggttatgggcaaattcggcacgacaaataaatcaacggagaatcttctgcgtgataaattcgtacccgagacatctccaactaatattcccactgatgtactcatcaagcaagggcaaataacggattccaccgaatcactaattcatggaggcgcagaaaggtatattgttaacgctttaaagcctatagaattaaataaaactgaaggctttttcgaagacccgccgttccatcttccttctccaccggttgattcgacaaatctggagtatgaagacgttaccgatcttcctaagaatggtttacgatatgatttgaatgatatatccgttgaggtaatcgaagatttataccgccagattgaagcttttttggttcatttcaaactatccagaagttttttacaaattttcaaaaactatgtcaatattcttattcaagaaggcatcaatcctttacgcgatgagtacttcacaatattggaagatgaactgaaaggttttttcactttcaattctgttatagaagagattttagaaatatttttaatccaccctcgcaacaaattcattgcattgtcccttgcagaatatacctacgctaagaacaaaatcagaagacattttaatcactggaagactgtatgtgaattgaatgaagaggcaaacaggtttgcaaatcaagcaaagctgagggtacaggaagccgtcttctatatttggagtgataaaacattaaaatactcacagatggccaacgatgaagctgaaagttttaggaatacttggctactatttcgctcgttccaacaatggataactttaacacaaactcttaaggagcagtcaaggttagcagatcaggcctttttgaataagatgtttaggaaaattttaaaggcacaagagcattggaaacacttagaaactgttaacactgacaacattaagaagatatttttacgaacaacatttcatatatggaagctaagacataaagaaataaactaccacgggttggaaagaaggattttcgaaagaataaaacagaaagttataaactatgaatacaataagagcattgcagaaaaagtgaggtcgttttctctacaaagaaaatatctgaataaatgggaaaagaaaaacattgaaaacgaagataaacttggggcactttatgaactggagaataaattcatcaaacaaaagttttttcgcaaattaaaccggtcatttcaacatagtcaacaagaggcaattgcaaagagtaaactaaatcagacacttttgaggtgcgtttttgagaagatgtggctgaaaagattcgaagaccatctgcatttgtattcaattgtaagtctaaaagaggctaacctcgtgaagcgtatttttcattcatggaaaaaacttctatatattgacctcaaagcaagcgattattcgaggactaatttgctcaagtcatcattgcgaagttggaaacttgaagtaaagttaaaaatatttgagcagaaatgtaaaaagagtattcaagcaagcgcgtatcgtacatggaggaaaagaatacagtatgggaaaatatcgagcgaacatgttaaaacggcattttgtgcaaaatatcttggtgtgtggaaaaggaggatgctacaaatgaattctatgaatgacgaagcatccaaattttacgaagagggtctcgtaaatgagtgtctagctatatggaaagaacgcctgattaaaactaaggaattggaggatagatacaatttcttatgtaagacacatgcaattttgactgtaaaacggacgctaatgcatattgataatgttcatttgctatatacgaaactggcgccctctatggatagagtaaagctttctaaggcctttttaaagtggcggaaagccacaaggttcaaagtcaggcataagttaaacgatattttacacgtttatgaaaagagtaaagagcgcgaacttcaaagccaactgttcaacgcttggcgaaatagattttgcttctacacagaagaatgtaacattcaggctatttcaaagagaaactaccagcttgaaaaaatggtgctgaagaaatttagagaaagacttttagagatagtaaaatcagaagaattagcagacgaagttcgcgaagaatttgtgttagtcaagacgttttatatttggaaaactcatctagacgaaatattttatatgagtacattattggaacaatcggaagctaataaacaattcataattacatccaaattcttgaaaatgtggagtcttcgattcctaaaaattaagcgtaatgatgagacagtcgaggtgtttcgtcatcggtgggacagggccactgtaaggggattgttattattatggaaaaatcgttcagacagttctccaaagagaaggaaggacttcaatcttaaacatgaactaaaaactcccataagatcagactctcaaaacgcctcaaccataccaggctcagaaagaataaagcagcacagaatggaagcgatgaagtcgcattatagcagggcaagaagagccataccaagtccggtgaaatcttccagtgttcttgattctacagctaaaaaacagatcaaccttgaaagtacgacaggcttaaacggatctccgacgcgaggaaaacctctaaggtattctcctaggcgtaccactagaaacatgccatccaaagttgaccatattgattttggcagaatacccgctgtaccttttagcctaagcgccaattctcctaaaatcgatcaagatatggattatataagagagcatgataaatccccgttaagtcgtaaacgtcaatagatatatatattatgtacgtatgtatgtgtgcatatgtagtcgtaacctttcttgcttctgagatgcatacaattactaataatattctccaggtctatgaaaacatcacaacatactatacttttcgtgttcgcgttgtaagctataatggaaaatggacgccataacgcattacttaacaaactacagtttgtcaatagagttgtccagtagagttaaaaggtcaattcaaccggtcttcaataagacatgtcactgaatgacttcctaagttccgtgctacctgtcagtgaacaatttgaatacttatcgttgcaatctattccgttagaaacccatgctgtcgtaaccccaaataaggacgacaaaagggtcccaaaaagcacgatcaagactcaacacttctttagtctatttcaccaaggaaaagtttttttttcattagaagtgtatgtgtatgtcacgctttgggatgaagcagatgccgaacggttaatatttgtatcaaaggcagacactaatggttattgtaatacgagggtaagcgttagagatattacaaaaataatattagaatttatattatcaatcgacccgaattactatcttcaaaaagtaaaaccggcaataagatcatataagaagatatcccccgagctgattagcgcagccagtacgccagcaagaactttaaggattttggctagaaggcttaaacagtcaggcagcaccgttttgaaagaaatagaatctccacgttttcaacaagatctttatctctcattcacctgtcctcgtgagattttgaccaaaatttgtttatttactagacctgcatcccagtacctcttcccagattcttcaaaaaacagcaaaaagcatatactaaatggcgaggaactaatgaaatggtggggctttattttggatagattactaattgaatgctttcaaaatgatacacaagcaaaattaaggataccgggcgaagatcctgctcgagtaagatcatacctaagagggatgaaatatccactatggcaagtgggtgatatatttacctctaaagaaaattctcttgcggtatataatattccattattcccagacgatcctaaggctagatttatacaccaattggcagaggaagatcgcctcctcaaagtaagcttatcatccttctggattgaactacaagagcgtcaagagttcaaattaagtgtcacatcatctgtaatgggtatttcgggatactctcttgccactccatctttatttccatctagtgccgatgttattgtaccgaagtcaaggaagcagtttagggcaatcaagaagtacattactggagaggaatacgatacagaggaaggcgcaatagaagctttcaccaatattcgtgattttctattgctcagaatggcaacaaatcttcaatctttaacagggaagagggagcatcgggagagaaatcagccggttcctgcaagcaacatcaacacgttggcgataacaatgctaaaaccgcgtaaaaaagctaaagccttgcctaaaacttgatacatattgatatttattatttagtacacgtatgtagcatcgatcttagaaaatgcatgtttgtatttattgttagtaccttgatcgccacctttctaggtaatgataggtcctcaacttttactacgcggtgcacgcctgtaaggtcgggcaaaacaaagtgtgggaacaataaataagagggtaggatgaaatattacctttactctactgctcaggttggccacaatttgctaaagagtttatcattaagtagctaccagcgaatctaaatacgacggataaagaatggctagtttagaagatcttattcctactgtcaacaagctgcaggatgttatgtacgactccgggatcgatacactcgatttgcccattttagctgttgttgggtcacaatcctccgggaaatcctcgatattggaaacgttagttggaagagattttttacctaggggtactggtattgtcacaagaagaccgttagttcttcaacttaataacatatctccaaattctcctctaatagaggaagatgataactcagttaatccacatgatgaagttacaaaaatatcaggattcgaagctggtacgaagcccttggagtataggggcaaggaaagaaatcatgcagatgagtggggggaattcctgcatataccaggaaaacggttttatgatttcgacgatatcaaaagagaaatcgaaaacgaaacagcgaggatagccggtaaggataagggcatcagtaagattccgattaatttgaaagtgttttcccctcatgttttgaatctaacgctagtagatttgcctgggattacaaaggttcctattggggaacaaccacctgatattgaaaagcaaatcaagaatttgatcctagactatatagccactccaaattgtttaatcttggccgtctctccagctaacgttgatcttgttaattctgaatccttaaagttggccagagaggtagaccctcagggcaaaaggactattggtgtcattaccaaattagatttgatggattctgggactaatgctctagatatcttgtctggaaaaatgtatcctctgaaattggggtttgttggtgtagtgaatcgctcgcaacaggatattcaattgaacaaaaccgttgaagaatcattggacaaagaagaggactatttcaggaaacatccagtctacagaactatttcaacaaagtgtggtacgcgttatttagctaaattgctaaaccagacattattaagccacattagagacaagcttccggatattaaaaccaagttaaataccctgatctctcaaaccgaacaagagctcgctagatacggtggcgtaggagctactactaatgaaagcagagctagccttgttcttcaactaatgaataagttttctacaaacttcatttcatctatagatggtacatcctccgacattaatacgaaggaactctgtggtggtgcccgtatttattacatttacaataatgtttttgggaattctttgaagtcgattgatccaacttctaatttatccgttcttgatgttagaacagcgattagaaattctactggtccccgtcctacattatttgtacctgagttggcttttgacctattggttaaacctcaaattaaacttttactagaaccatctcaacgttgcgtcgagttagtttacgaggagctgatgaaaatatgccataaatgtggctccgctgagctagctagatatcctaaattgaagagtatgttaatagaagttataagcgaactacttagagaaaggttacaacctactcgctcttacgttgaaagcttgattgacatacatcgagcctacatcaatactaatcatcctaattttttaagtgcaacagaagcaatggatgacatcatgaaaacgcgtagaaaacggaatcaagagttattgaaaagtaagttgtctcaacaggagaatggacaaaccaacggtattaatggtacttcatctatctcttcgaatatagatcaagattctgctaaaaacagtgactacgatgatgatggtatcgacgcagaatcgaagcaaacgaaggacaaatttttaaattatttctttggcaaggataaaaagggtcaacctgtgttcgatgcatcagacaagaaaagatccattgccggtgatggaaatattgaagattttagaaatttacaaatatcagatttttcactgggcgatatagatgaccttgaaaacgctgaacctccactgaccgagagagaagaattggagtgcgaattaattaaacgtctgattgtttcatactttgatattataagagaaatgattgaagatcaagtaccaaaggcagttatgtgtttactcgtcaattattgtaaggattctgttcaaaacagattggtaaccaaactctacaaagaaacactgtttgaagaacttttagttgaggatcaaactttagctcaagatagagaactatgtgtgaaatcactcggagtttataaaaaggctgcaacccttattagtaatattctgtaattgcataattcatctcatttttgatcttacttcaacattgcgggcgtgattataggtcagtgtttattcctttactcagttgatgatttcaaatgtgctctcctctccattctttttcttgttaataaaaatccataactaaataaataacaaatattagcaatcgcaaaagtattaactaagctagagaaccttcactagagaagctctacctaaaggtatagaacaggaaaaagtgtttttattttggcggacttcgtggaagattgccttccatcaataataagcgtagtccataggtacgatcatttcctttttaaccgttaagcaagcgacaagatgtattttgtttaccagcgaatgctcttatttatcttctgcgcctttccaataatctaattatcaatgctacgaatgattatagttttaactagatgaacgaaatttctaggttattaaagagtacgttatgcatcaaaagaatatcagtcataataagcagatagaccttctacatggtttgtagacaaccaaactggtgtatgctaatatcaacgagtaaacgcttacttttctaaagttgaatatttgaagtacacacccgcgtaaagagtttttaccccgaaaacaaatttttatgcttgaaaaatagctaataaaatgtttttattgttcggataacaaatacaatagtgttattaaaaaataaaacttatttaaaaatagtaatttaaattattattttattttaataaactttttaataatatttattacacgtgatttaatatatcctgtttttttttcatcattctctttctttcttatgttaacctcgtactacaagttttctccttataaaaagctgactaaaattagagattgataatcataaataaatttagtagccatttccatttttacattttgatttaatcgacactcaaagttcttatttgaaagctagtttagaacttatttgtttgctccttgatgaatataatgagaagaaattccactcagattaaatatgaagattgttaacggcaagacgctaaaagaaaaggaaaggaagtagatgatggcaaataaggtcactttcttgttagttacatatactttcacagaaacttgaaaataaccacaaaacttaaaacgaacgttattttgttcaattgcttaatttgtgaagatattatctactacttaaatgatatattaacacttatgaggtactgacactgcgaccgcccttttgatctgatcccacccttcgtatatctctgggggtttgtatagcgttcacagaatatgaaccttcaaaagtgggttgagaaagtggtgataaatgcgctgttgccgagtaagaagggttgtggattatcggagagtgttgaatcagtggtgttgttgctcgatcatttctccctctttgatttttgtcttttacttttccacccctggtaattattatgcaaaacaataaagaaatggctatggtaacacctattataaccccaaatccaaccgctatccctggcaagcgcagatggtatttctcgctgtttagccaagataaggatatgggtttgtcgatcagaaatatgcatgaacttttcaaattagtagtgcatcctgttttaagaactctaacttccttggtccagtcgccctgtatgctaacaaaaacgttgtccagatgatcttttctgcagtttagttttgtacctagtttagtgctaatggagccattgcagtctagtaggttttgcgttacattagcaggaatcaaatggagttcgaggaattttcttaagtttgtcgagttcgccgtgatgccacttaatggaatagaagaagccgttggaactaaaagcgagtactcttcgttattccaaatgattgaagaaaggtcataaaacaagttaaaaaagtcaaatatttcttttgttccagtagtttctatcagctcttttagggatatctccaaatcgactggaaaatccaattggtctataggatggataactccctggttgaaaaatatatcggaactctcctcaataataatactttcctttatagtactcactgagattttcgtaaggttttggcttcccacaattttttgtacgccaatagatacagaatttccgtataaattcttgacagtagtcgaaatactataattgttggaataaataaggtcttcgaagattaggttcctcataagtaaatttagggcggttttgtttgacctcaaatagtctatagtcaaatcattattgtcccatgaattcatacatggaagaagtatcgtgtaccccttatgatttgatggtagatccaaaaggttaagttccttcaagagcattagggaaatagaacagtggttttctggtgctaatgacaacactaagtcgcccggtaattgaagatcatcgtcaatagaataaatggacgtattaccaatctcataaggttttgtgtttaaaatcttgaagcgaccattgatgtaataacctttattagaccttgtgattttgaacttttggcagtgtccacctagtcttttagctgaagagcaaaaggcggagtcataaatttgggtaggtgcgtattgaatcgggcgcaatgaggaaaagtcctgttcaaggtcaattttaccttctacaaaatggtacagaagtgatggttttgtgtacccacgatcctcattaaaagaggcttgtggtacaaatatggtgattttccttccgttttgaatgaatttttcaaggtctctgaagtataactcctttacgaattctgagcagttcaaaccgtgcaagtacttttcagcatcaaactgtatatgcgttcgtaaaaagtctaagtcagaaaatccatgcacgacgcctatttcaaaaattctgtttgatatgggtgagtaatctgaattatttacacttactgatgtaccttctgaattactcttcataaaaagttttcgattgtttttattttctaaaattagttccttgggtaaaataccaccatacacgtcatcaataatgagttcttgaagaagggaagttctatctgcggcccatttggcctgagaaattgtattagatttacccaatttattatatttgtcaagtagatagtttatttcgattgtattgaagaattttcgaaaattaacatctaagggcactaaaactgtggatgagtttgtatatgcattatagtttgaaaaactgctgataaaatcactaaatatctttaaatcttgggtttcttcatctagttgtaccagcaactcatttatttgaggttgaattagtaaaagattgttaataccttgtaatgaagcattctggaaactaggcagcaaatcgggttcgacaacagcaatttcattgacaaagcaatggcgctcatgctttctcagcaataaaggtgcttttgcagctcttttctccaggtaggtaccgttttcaaggtctctcacttgcaataccctatcatgaataaggaaatcttcaatatggaaatgctcctcaaattggtctgtggtttggtcccccttaataaatgctgaattaatcggagcaaaaagtgtaaagttctgtagctcatttaagtactgtacgtgaccagttttctgaataatccttaaaaaagttgagaattcaacattttctgagaggatatctattactgtgctaaatggaaaatcgtcccctgggttttgtagaagtgcttgtgtaagccctaatatcggcagtagccaaaaaatgtatttaattgtttggattgccatgttcatcaaagggctccgtttgattcagttaatacatgctgtcactcacagcagcttagataagaagccgttttgtcttattttctaggcccttaatatacgcctaatggggaagtccgaccgaacaaaattctcctaccgggttttcacggtaatgttcttccataaaaaaagacaatatagtaagctgttaatattgatttggtgaacttgaatctgatatttgtttctattgcttacgtataatacttttgcggtaattcattcaaatttcatacaatgctaatatttatacaattctactcgacacggcaaaaatgattggctaacgataatcgtggctctttatatacttaatatataggatctagctatttagaacactctttagatctagatgatagagagcgtagcccctttgtaactacaggacaataatgcttttcaagaagagcattatcccataaggttgctgcctctgggttactccttgaaggattatcggcttccattatgaaatgaccgttgcctattctatcctcggaagagtaaaggcctgaaatttctggatatctattcattaatttatcaataaatttaagaatggcaatacttgttttttctggggtatggctgatgcacatgtacaatcttttggtaaacgccgtagccctttctttagtccctgatttagagcggaaaaatacatggtccagagcctttagcagaagttctgctttggtagaaacgttaactgatggttttattatttcgttattgagtgggtcagccaaccttagcgatctataagataattcgatgtctgcatcaagacagatataaggtaatagcgcgtaaagcccatcgacgaatttggacaaatccacattaactttcatatattgtgtatttgaaataagtgagaatgcactaacgatacaaagcaaagccttacggacctcagcagaggaaaggttatcgaattcagtgtcactaataagttctttcattacttcgaggaagtcccctaatagatcaaagttggccatattaccaaacttcgttagaccttccaaaaccgatccaatgagtgtttttgcattgtttttcaagatattcaaatatatagtgaaaacgatttttagaatttcggattggtttctttctctttcctccgcagaaacagcttgctcagcgttacgcatttcttcctcaatttgttgcatctcttttcgagcttttctttgcttcttagaaagatggaccctatctttctttttgagcttaggagcgctaacgttacctttcaatttagtattagggtcatagtcatgtaagacatctaacgataataacatatttaaaacagattcttcgatgttgaagttcctcgtctttagtattttgttgaaaattcttagtatctcgaatgatattgagccctcttcgtcctcatttaatagagtttcaaatgtctggattatttgaatggaagttggatctgttgaaattcttggtttacaaattctacgcaacagtaaagtgaaaatgtctgttctaaagttgaaatgggatgccgttgaaatcaattcttttgcggcttgagtggccaaaatccctaatgaaacctgtataggagcagcattactgggagtttttgaaagactctgtaatcttccgacgtaatttttgtagttataaactaaggcttgctcaaagtttctaagcttggagacttctttagaaactttttccttcttttcagtttcagttagtggtcgaattctatagcctggtatgatactcttaaacacggggaccaaagccaacatggaaaacttacaagtattaggatttttagattccaccattttacatagacgccccaacgcagcagtattttcttcaggctcctccataactttagtgactaaatcggcaatgtcttcttttagttgcagaattttttcctccgtatcaggctcatcctcctttgcctctgcttcttgttcttcattaggtccctcatcatcttctgaagagtcattagagtcttcgtcttcctcatcatcgtcctttggtttttcttgggctttatgcaattttctttcaactttaccgttaacttttataggcaggccttcaacaagatttgatgtatcagaccgattcttccgaggaaccatttcgtaatcctgttcttcttcatcccaggatgagccttttgcgctatatatggtattttcatccatatcttccggtgcattttggaaaacattgccttctaacaaggaatcttcgtgctttcttttctttgcagtcctttcctgaatgcgaaattgagatctatttctcttagccattattactatgatatctccagcttttatcccggaattatactcttatgattgaagacataaaatgccaagtttataccatgaaaatactatatatggcaggcaggtgaatgagatgagataaaattttcagttttcgggcatcgctgaaaaaattcaaaaactaaagtaaaacgacgtcccatggtctactctacggtgaagaaaatgagggaagacattgaatttctgaatctaagtaactacaaaaaagcatacactccatggaaagagtaaaataggataaattggttttatgtagttaaagaaaaaatacattgttatatatggagtttgctgcgcgcctaggcgttctcgaagtttctcctttgattttactttttggaagggctttggacaatttaaagaagataatttgaagtaccccatcaaatgctagaatgaaatatttaatatactaaattaaggctggtatttaaaaacgtaatcttatgtgtagaacctcagtgaaaaagcgctattattaatataacagtattttcacggagctttttttattcaaaaaggttttcaagacttggcagaggacggctgcattctcgaatgataatatagtattatccttaggatctaaataacttgcatcaagaatgatatctaacttttccttaccttggaaaagtaagtcagtagcttctataattttctgcattcttgttggagtggcaataaaatatagtgaatctttatttttgtttgattttttagagctgtcagtaagtaaacgttccacggtggctatgtcatcctttagtttacttttagagaataatttgacgcaatttttgccaccgtttagactacgataaacgtctgctactctaatattagacatagaaaaaacaattttttttggagctacggaaaatttttgaataaaggctgggaaattgcttaatctgcgttcagcgtcaaatttttctgtcgaaagaaaatcatttcttttgaagtaaagttcctctaattctaaaacactcaagtcaggatttttttctcgtatcaaagttgttaggtactcaataattttttctggtgaacttgctggaagtgcttttcgttgtgagacgatatactggctttcctctttctttttctcaattagctttgattttttctgtagctttttctgtcttttcgaaataggtctattcgaatcatcttctgaatttctctcctcttttttcccatctatatcatcaacgtcatcgtcatcttgttctatagacctcttttgtacctttttggttgggggactaccatccttggcgtcaaaaattacttcatgttcggcatcaaaatcataggcgagtccatcatctaaatcatctggattagacattttcagctcaattgtcctgacgatatgtttagaagttagtagcggggatcaaatttcgactttcattgcctcatccatggtcatctcaaaaattttctcttcaattttttggtaaataccaagtgcaatgaatgtttgggtgtctttgaatattgaatattacagactaaaaatattatatattgtaaattaaaagttgattattagtaaatgtacctgaaatttctgttttcgatatcagtcaagtccaaaaattggtacttcttcctttcttgaccttcttgttccttatcacgcttttcgttctccttcttgcaaatgtagccaatgtataattgtaggggaacacaaacacactgagtgaccaataaggcaatctttgctggtatgtaacgtggagcagagtatgccctaaacatctgtggagcaataatacaggagacattgtatacaatcattgtaatagcatttctaaaaactcttttggtgtaaccggaggtgttgcatgaattccagatgtaaatattggtaatgacacaggaaccactgtaaagcaagtacagagaaaataagttaccgatcttatgggataagggtaaactgataagaacgatacaacctataatagctggaatatacatagatgtggttatgagtgtgatatgaccccagcgggacaacatttgagttgttataagaataatcatagccgtaatggcaccaataggcaactgcagtaatgctgtttcgtacttgtcgaaaccaaaagtaccagtgatggtcactgaaaatgtaccaatggcaccagtagaaatttgagaacatgcagttaataaaagcatcggccaagtaaacttatcatgaaggaatagttctttaacttgctgcttcttaaacttctttgtttccaggccagtttggttagctctgatatgctcaacaacttgaattttttcctctttgtttaggaaccaagcattggtgacgttatctggaaggtataagaatgttagaacaccaaacgcaactgtaaccagaccaacgaccaaaaacattatttgccaagaggtgaaagcggtaccatgataatgtaaaaagccaaaagaaattaacccgcccacaatataacctgtaccagcctgtgtggcccagaatccaattcttgcactctgttcagatttagtatagtacataccactaatagcgatacaaccaactgcactcgaggattcaaagagacctaggagagtacgaacgaccatcaacgaggcgtacgtcttacaagcagcatggcaagccaacacgataccccagacggtaataaaagtacctaggattttggaaatggggaatttttgaattaagtaagtgaccacaggttccatgaaaatgtaagcagcagaaaagatagtacccaaattagaaaattcgttacctttcaaatgatctttgatacccatagatgcagcgtagttcagcagagccttatccaaaaacatcagaagatatgtacagcataaaaagggcaggatgaagaggtcaacttttctcaggaccttaggagataattcatgggaaccatagaagttggcttcttcgcctgctacaacatcgtcttcattagccgtggagctttcgtcgagaccgttctgtttcaggaatcttaaagcaacgtccgcatcgtctacattaatgctcgaggtacttacggaacaactatcagcgttagctgccttcttctccacgtccatggatcgttgtgacatgtttttcattgtattgatttgctgacactctcactacttctcagcaacaacaaagtaaactttaatctatcatactttgaactatcttatatacgtgtatatatgcacccgctgagatgctcatcgagattgctcatcacctctgaaaaggctgtctgtcaccaccatgttttccgccggaccaaatgacagttccttaagggaaactcaaagagactatattaactaaggaggatcaaccagatatgcaaaaaaaacaaatagttatgacggcactcgaaccaaccaaacaccaccctataattaatgttgataatgatagcgactcgaaatttgccaataaaacctgtctattacgcgtcatctacttgagagtaatatactggaagttcgagatactccgcacagggtctgggtggtaggtttctttgctattgtatagtttttcaagatacgtaaaaggtcttcatcttatcttatatagatgcaggtgattactagtggggcaagtcggcagctaattgcgtgtgtgcggaaggattgtgcagtagaatggctcctgtagttatttcagaatctgaagaggatgaggatagagttgccattactagaagaactaagagacaagttcattttgatggcgagggagatgatcgtgtagaccaacagcaacagcagcacagttcaagccacagggatagggataaacatgtgcagcgtaagaagaagaaaaggctctcgaatagaaacctgcaaggttcaaatggtgggtacgcttgggaggatgagatcaagagaagttgggatttggtgaaagtggacgatgaaggggatatggcatctcttgtggctagcatagtcgaggccagaaagaaacgtactgctaagaaaaacataacgccataccaaagaggtattatcagaagtttaatattaacactagattgtagtgaagctatgttggaaaaggatttgagaccaaacaggcatgccatgattatccagtacgccatagattttgtccatgaatttttcgaccaaaatccgatatctcaaatgggtattatcataatgagaaacggtttggcacaactggtcagccaagttagcggaaacccgcaggatcacattgatgcgttgaaatccatcaggaaacaagaaccgaaaggaaacccttcattgcaaaatgcattggaaatggcaagaggccttttattgcctgttcctgcgcattgtacaagggaagtactgattgtatttggtagtctttccacaactgatcctggagatattcaccaaactatcgattcgttagtttctgagaaaattagagtgaaggttttggggttatcagctcaagtggccatatgtaaagaattatgcaaggcaacgaattatggtgatgaatccttctataaaattttactcgatgaaactcacttaaaggagctatttaacgaggctgttacccctttacccgttaacaaaattaataagggtttcacactcgtaaagatggggtttccgacaaggatattcgaagatactccaactttttgttcgtgccattccaagttagtttacggcggatacttctgtcccaattgtcatagtaaagtttgttcattgcccacagtctgtccatgttgtgacttgatgctaatcctttctacccacctggccagatcatatcaccatctgatgccgttaaaaacatttgcagaagtacctacaacagaaaaatttcgatcagaagactgctttagttgccagtcaagatttcccatactgaaaaaccataaaaatggtaaactactgacaagttctcgctatcgttgtgaagattgtaaacaagaattttgtgttgactgcgatgtgttcatccatgaaatccttcataactgcccaggctgtgaatccaagcccgtaataacttaacgaaaatctgtcagcgtataacacgatcactcttccatcatataacaaatccaagtagtagagaacgaaatagtttttgatggacatataactacataattattacaaaaataacctcatttaatgtcctattgtttattacgagaaaatcttaatagcacttacggcattaagaatatttattactattttcaatttatcaggcacttattcaactaaaaaaaaaaaaaaaattctttgttttacaataatattaataattattttgaataaatatcgttacattctatcataatgtcctctacacggtacaaccaaactcacaattctatttgagtgggcgagaggtttgaattttttcttactgggctgtgtgtaggggtcatagatgtcgcttgtttgaatgagtgagggttggaaggtgcaataggtttctgtggagatttaaccaaaacactgtcggtcatccggctttctccctgcttccagctgtcaaaatcaatcaaggcttgcatacatccccactctgtaattttcttactaagccagtgtaaattcactggtttagtcaggtagtcgttacaaccagaaagaagtgcttttcttttatccatctgagagttagatgcggtcaatgctacaataatcacgggcgcctgagagaatctctttgaagtacctttttcaagattggagtgtgagttattgagacttttttgaatgccaatgccattttgtttttcgaagtccctaatctgcttggcagcttctataccagacaagacaggcagctgtaaatccataaatattaaatgaagaccgccttccttccaaatattaacagcttcttgaccatttttagccagtttatatgagattttgtgtttcctcagaaaggaacctaagatagcttggttgatgacgttgtcttcaactattaaaacattaattttggggaaaactttttcacttgtggtggtaaaaaggtttggtaaaggatctggtggagaggaaacagcaaaaggtgcgttataaagcgagtttgagtaatgcggcgtttgactacttgttaatattggtgatgcgggcgtaacgtcttcttttcttctttgtacttccgacatgggttgcgttatgcctataccagcttcattaagtgatccgctttcttgcgaaggggatccggtgttcacttctaactctgaatgagtaattgtgtcttcattattgaaagatgaatccgtgtgggccactggtttatttcgaaaatctacccctcctttataaccttttggtaacagcaagattgcttgccaaggagactcggcatccttttcctcatccttcagttcttgtgacgctcttctcaattgctcttcatcagttattaatttaaattcctgagggctgctattgccatctttacctttaagatctgctttatcaccaattgtttgcttaagaccttgttcgcccggagaaatatggtcgtctagatgaaaaacaccaacggccccatggtctgttggttgagttttctgctgcgaaatttcttcattcgtaggaacatagtctacaacatttaagatatctaaaggcggtacatcctggcgtaaattaacattcgaaaatatcagcaaaggctgcgatgcaggttgggaacccatggttccgaatagttccttatatatgttaatagccaattcatccggttcaaagatgattttataagtgcaatcattaactgattctgtggtaaaatttaaaccttttctaatcaacggccttgtgtatttatttttattatgcggtgagacgtatgtaagaccagctgatgccataatttgattatcagaatgaaatttagggtagggtgagactgaggcaaatcgcagtaacggacttttagttgttgctggaaactgtttaggactagtagagtatggtctttgcgggcttagcattggcgcctcgttgggaggaaaatccacattggtagtcgcggccactgtcggcacggcggcaaaggcgtcgtataatgctcctcttttctgcgtaggtttaggatgctggagaacattcctgtcctttgcaaggtcttttgaaagaccaaatgatcctgctgtggggctcactgaactcttggtattgctattaacggaaaggttggcgccacttccagcaccgttactcttacttcgacaactattatcgttagtgttgttactactggtattgtcggcttgattgtcaaatttaggtgcgtagaggcctattgcaatggaagcattatcgttaatttctcgccatcgagtcgaactcagtttctgaaaaaacctgctcttcaaatcatcaacagtatctatttcatcgaactgtacagcaattggttggtttacttcatcagtggagttgtctattcgtagccaaaccttccacagtaacgcagaattgagcatttttacttgtctccccaaaatcgattcgtttttgatttacagcagcctttccaatatttcttatacaaaacggccgaacttgtactcaaaataaacgctattctgaggtctaaaactaacaaaacacgtaatttttctgaataaaacaatgtctccaactagttaaccacagcttggctagtttcaatgtagtcattcctaacaaaaaggcaaccagacctatttataaatatatagccactattaaattcactagaaaaaaagtcaaagattcaatccaggggcgcttttagggcttcggaaagctgaaaaaaatagttaggacactgatatcaataatatagggaatttgaattattggaaaatggaaattaggttaagggataccaaaaaaagaaacgcgataattataggcatggagatgagaataataactatatatgtatgcggttcggtacatattcattgctgactgaagtctgatagtagtcgtggcgaatggaggtacatgaagagcaggtctctgcacctgtaacaggggatgctacagcaaaatatctgctgcaatatatcttgtcagcaagaggcatttgccatgaaaatgctctcattctagccctaatgagattggaaaccgatgcttcaacgcttaacactgaatggtcgatccagcagtgggtcgacaagctaaatgattatataaacgctataaacgtaaaactgaaccttttgggttacaagatcattcggatcaaccacgggattggtagaaacgcagtgactttaaaggccaagcagaattttgagtccttcgaagataatacagcaataagggctcacaataatgattatgcagttttgcaatcgatagtacttccggagagtaacaggtttttcgtatatgttaacttagcatcaacagaagagactaagttagccacaaggtttaaccaaaacgagatcgagtttatgaaatgggccatagaacaattcatgatcagtggagagactatcgttgaagggcctgcactggaaacctcgataattgtgaaggaagtcaaccgtattctagtagcagctacaggagactcaaacctcgcgaaatggcgtaagttcagtacgtttactgtagggtccaccaatcttttccaatttcaagaattaacagcaacggacatcgaagacttactactccgattatgcgaactgaaatggttttacaggactcaggaagggaaattcggtattgatcttcgctgtatagcagaactagaagagtatctaacatccatgtacaatttgaacacttgccaaaattgccacaagctggcaattcaaggtgtcaggtgcggcaacgaatcatgccgagaagagaatgaggaaactggagagaatagtctgtctcaaatttggcatgttgattgtttcaagcattatattacccatgtaagcaagaattgtgatcgttgcggttcatcgctaatcacagagggcgtatacgttatttaaactaaaatacatagctttccgtgttatttacaagacttatctatacaaacatttgattgcccgaagtattttaatctcctaaacggcatgtgattgaacacggttcgaggtttataccacttgtattaggcatatatgcaattgcaataactcattttaggttcccgttttaccttatttgctaataccccttttttccaaaaagtccttagcttcgtttatcttagtggccaaaaatggagaaccacctttgtcaggatgattagctaacataattttcctatgaacctctttcaacttttttttagtcaatgtattttctgtcaaattcaaaatctgtagagcctctttagaattcattttcgggtcaaatccgcctttcaagaaggcagtagtggattttccaccgttaagtcccttcgatattgatttatatgcaccggctgtaaaatataaagttaaaaaggccccaaaacctgttatcacaggatgttctcccatgtagttcaaagcttgatcaaaataaaggtccattccggtcttttgaccctgcgaaccattctggataccgacattaacaccagctccatcaacagtaacgttcgcagagccattagtttgaccaggaatgggtagttgtggtgcctcaatagaattaccagtattactttgagaactcatgatattgtgcgggtggaagtgtttatgcaaccttattaaactgtgctcggccagtggagacgtacaaattccactactattcgtactttgtctagttcaagggtctccgtcgagtgagtcctacgttgattcaaatggctttcacatttggtccgattctcgctctttaaattttttgcccgctcgcctcgaactcagcggagtgaaaaattttcactcgtcttttattaaataatgtatttctaaactcatctcatctcatcccaccctatctccaacttacatcagtttctatcttgatccgtgatataccacttttaagttcttcgacttgtgatttgaaagatattgctattcaagcgtgagttgtccatattgttaccaccacctccccgtgatttacattcagaaactaaaaggaaaaggaagtagaagtttagtaagtataaaaaaatgagaatttatcaatgccatttttgctcatccccatgttatccaggtcatgggatcatgtttgtgcgtaacgatgctaaagagtttaggttctgccgttctaagtgtcacaaggcattcaagcaacgtcgtaacccaagaaaactaaaatggaccaaagctttcagaaaggctgccggaaaagaattggctgtggattctaccttgacttttgcccaaagaagaaatgtccctgttagatacaatagagagttagttgccacaactttgaaggctatggctagaatcgaagaaattagacaaaaacgtgaaagagccttctacaagaatagaatgagaggtaacaaagaaaaggacttcttaagagataagaaattggtcgaatctaacccagaattattgagaatcagagaagttgaaattgccagaaagttggctaaagaacaagaaagagctgaatcagtatccgaacaagaggaatctgaagaagaagaggaggatatggaaatcgacagtgacgaggaagaggaagaacaattggaaaagcaaaagattctgctaaagaacagaagaagaaatacaaagaaaattgctttttagttagaacagaaccgggctaattgcctctttcctttcttttctcatacttatttcatgggataaataagaatcacctgtatactattatttacattacataacattacaataactattttcaagggtcctcttacattcttatcaaaggtattatataatctcagtatatgccaaacgtctgacttaggagttagagatgttcagaaacttctcaccaagtggtgatttgacaaattcacagaaatcacgaacgtcattcctggatagtatcttaaaatcaatgatttcaaaaattggcggactttggtgtattccataccataccccaatgcgaacatccagtacctgcccatttatcaatctcaaatcatctttatgggctgaaaataatctttcgctcatatacaaacgcatctcctctgcgccatttgttgaattgaggcaatgaagatttctaactatcatttgacagaaaaaacctttaatgaattcttcatccgatttacagaacaagaaatctactaatcgaacaacaatcctgaatcttttggacggatgaataatgtttggttccattccgtttccaccgtaaacattgttatgaatatcgtaattcgttgctattttatccttcaaacattttaagtctagaactaactggctcatataacactgtcgtagttctctaaaaagagcaaatagagctgtatgtaaccaatacaatatagtgaattatgtcctagaataagggcattcattattctccatctctgcttcagagaaaaaaaaaagaaaaagaaaaaataacgacaactgcaggactcgaacctgcgcgggcaaagcccaaaagatttctaatctttcgccttaaccactcggccaagttgccatatgactattgatttatatcatattacgagcccaaataatactggggtgttttgacaatcctaatataaacagtcttcgagaagtaaccagttgtcaaaacggattatcagcttgattcaaggaatgttaactgtcctatatcatataaaatatgaatcatactaaatggtggaagcacggatcttggatctaaactaattgttcaggcatttatatgtttgggtagtttggctaagggaggccgggttttatctcatgttgttcgttttgttataggattgtttcatatgtattttatgaacgtttaggataatgtattgtcaggctgacgtatctcattttgagatacaataatttaacctattttatgttaaatattacacaagatgataaatatgtcaactaaaaactttaacgccgagcttggccattacaatatagagcacatgctatgatcaaatgaattagatgaatacaagccaagaaagcatttttttaattacacttcatgcttttgttggaatgaaactgtaaaataccatctgtttagtagtatttgtgttaccagtataccgtcacatgcggtgtaacgtgaggacataaaaaagtcatcaaaattaatgtccccacgttacactgtatatgacagtatatactactgacatgaatactagtcgatagttaatacatgattcttattacaacatgatgattacagtctcgtcttggtctgttgtttgaccctactattttatgctattttttgtatctgatttgaattcaaggcaattgttgtaattccattcttggcataaccctgtgtagattctacagataagctgcttttttctttgagtggtgcccccgttgtttattacccgtcagtatcataacatttgagcatctcacatggttacgaatgtaaatatgaatcaaagaaggtgcaaaatcaaaaaaaatcgaaagatttgacatgcctattgaaaagggaaagttgtatatctatcaattgttaattagttacttggtcatctccattaccagctgaggtgcttagtcgacaaccgcattaaacatgaaagtgggtattataatgggttctgtgagggcaaagagggtatgcccagaaattgcagcatacgtaaaacgtacaattgaaaatagcgaagaattaatagaccagaagctgaaaatacaagtagtagatttacaacagattgctcttcccttatatgaagatgatgacgaactgatccctgcgcaaataaagagcgtggatgagtatgcagacagcaaaactcgatcgtggagtcgcatcgtaaatgcattagatattattgtattcgttacacctcaatataattgggggtatccagcagccttaaaaaatgcaattgatcgtctttaccatgaatggcacggaaaacctgccctggtggtaagctacggcggtcatggcggtagtaagtgtaatgaccaacttcaagaggtactacatggtttgaagatgaatgttataggtggagtggcggtgaaaataccggtaggtacgataccgttacccgaggacattgtaccacaactcagcgtgcacaatgaagagatcctgcaattactcgcatcgtgcatcgaaacaacgaggaataaataaaccataaaatttaactgtagtcgcaataaaagatgaaaagctaacacaattatcataggacactgtaatccagactttaattagtattaagtattgagtacaaagtacaaagtattatactaacggtagtttgggctcttcgattacccatacacttttaatggactaatttcatcaagtttcattcgaaaattttcttaaaatatatatatgcgtagtggtatagtattcatatttcatgaacttatttcataaaaaaagataaagcaaacctaatatttggatcggcgctcgaaattattctcagtattcttcagcattagacatctttaacatatcaatctttaaaaggtttcttcttcttctgtagctcggaatataagcattcatatatgaccatgttgtaacgcgatcgaaccaagcaacttcttcttgtgcaaatttcctagcaataccaggcacacctccttgacgatcaaatgcaattctttcagtctcttgttcaaaatctttttgacataaagccaggtatttttcctgttgttcaggttgcagttgaagatactgctggtaggtgatttctttgtaatagacagtcttcatttgaatatgttcgagactttttctcttaatctctatgaatattttctgtcttgaagctgccgtcttcatagaatgttgttctattatccacctcgaacatggcctttttatacgtttttacattaaacatccccttcatattagtttgttctcgacttaattctactcatgcttctgacattttttcatgccaagaccggccctgaaaaagggtccggatatacggatagcgccacacattcaattaggggaagtattatttgatacattgtcagcacacagcgatttaacccattatttggcatgacaagcaagctattcgacagtgaaaaatgcacagaacattcaaaattatacttataatatgactcttttcttttattgcagttggtattatatacatatatatatatatatatatatgtatatgttccccgagacaatggttttatttccaaaaaaagtgtaagtaagttattttctgtgtataaaaaaataaaagaagccagatgaagtgccaggtggcgtaccaggacttcagctttctttagtttgcataatgaaagtatcacttacagctcccttgaaggattagacgctattaaccccgatgaaaacgcatcaacaaaacctttaacacagtacttatttggtgcaatacatactcacacaaacacctgtagaaaatccccttatatgaaaatcccttttttttcttggcaagtatttctgataaaatgcggacaacattacctgcttagccgcctgccacagaaaataagtaggcttctctgtaaaatggaataataggctagaggtcaaaaacctcctcttcagtcatatctatgtttttaagggtctagggtccaatttgatggaaaagaacaaatggtcgagcatgttaattaatatttgttgctctgtttgaagagtatattataagacgagaggttctttgagggagcttatcttaccttttcttgatttgaaacaatttcattaaatgtaaacaattatcaactagaagcaaatataaagccagaaggaagaatttgctatgaacattaagactttgtgtcatccagaatataaaagaatctccgttgaatcgttattgaatccggtagaggagacaatagactgcgaaaaacctcactctcaaacaaaaatcaatactgctaaacccattagtgcatctttgtatgtcacaacgaataatactgctgttgttcagcacaatgtccaaaagaggaaaggcgtcaccaggagatgtccacagtgtgcggtgataaaaacttctccgcaatggagagagggtcctgatggagaggtgacattgtgtaatgcctgtggattattttatagaaaaatatttttggtttttggcaaggatctggcaaaacggtactttaacgaaataaaaggtgtgagcgtcaaacgaaaagttccaaagagcctctatggagttacaagaacgcgttaagagaatttatttctgctcggaatgttatatacttatgtcaaagcagtgattatacatttatcgactttaaacagttgataacgaacattatgtgttattcgaaagtcaaagtgccatacaaaacaagtggtttctcagttcttgcaatttttctttatcagcgtagtcccagaaaaaaaaatcatcactggaaatgtaagatgaattcaagtatcaagtgccgttggtattatagtttatcaattaatacgtaaatatatatatatatatatatatatatatatatgactatagtggcatacttctcaatggactgttgcttctatcattttatacatgcgttcaactttgaagattatcacaaaaacctcaaacttttcaattaatctgccccggtcatttaagttagctcttttaggactctcatgttttcaaaaaatagattgaaaagagcattggtggccctactttcaatccattgatcatgattcttcgagctatcgctaaaatattccaccggattcagagttctttcctttactgatatcgtaagaagactcgccttcgtttccgttaccagacctgacaaaaaactcatcccatacagatcccgaagtaacctggaaaaggatatccatgatatcttgattattggtatacgactggcaattcaatgcagaagacgtatttgtagaagcactttcatttatcacttgattaccttcgcttacatctaaagtattaaactgggaaacattgctgtgtttttccagttcggtaaaaaattcatctagaggtatatcaaaaggtgctttttcttcaaaattggttctattaaaaaccttgttatcaaaagtaccgtcgtcaaaaccaagtacgttcgtttttttatcataacttgacatgcggtttgcctgagaggttaggggatttgaatccgaaaatatccctttggcatcatttatttgcataaattttaactttattacaactgatgataaaattttgtaactcgtgtaacaggttttcgcagattcgcaaaaacctatcagattcttcagtactatcaacactttttcagtgtactctgacactttttcttgacaatcatttatgttgttttttgagtaaaaatttacgtaaaggtaagtcatacctgtcatgaacatgttatgaactgctacccacgtgtaaccaatttttttattgacacaaagattgtaaaatacgtctatggtgcccttcgtactgtccaggacaattttaaaagcggtatcattcaaagtagggaattttggagaaagtccataaagaatgctcttcgagtaatgatagttcagatcaaaccagatgctgttaaatttgcaattcatcatctcaaagtttttgggaacgtccacttggaaccaacgctcaagctcattgtaggtttcaatccgccagctctcgagatccataaacctcctcggcaattctgcaccgggcgcgtagagtattctcactatactagcttggattcttctgattttatacatggccaatgcgataacttttgaagacggatttgggcttggtaagtctgagtagtcgtcaatttctcggttagttaatgtgatgaaggaatcgtccaaaaggctaggatacctggtggtgatgctttcttcaggtataccaaaaggtcgaccaaaatacgagcaaatttgccgatctaaggagtaaacgcaccaaaatagacgcctgcgtatttctctggtaaaggcgtcataatttttattaattttttccgaatgtagtcctaggtcaaccgttagtcttagtacagaacccatagtataccaaacaccggggacattaggtctcattattgaatagattaccatgagcaaagtgcctgccaatgcctccaacctgtctgaagatgaaaataaagatgcaatatatttagtagcgcgtctcttatatgtcgcgacagtagtaatatctgacttaagtacctgcgtagcatggccaatagcaaatataatgtttaaaaaaaaataaggtatgtgaaattttgtcggtagttcaactatcggacgcatgttgactttttgagatgtctcccaagtgtcataccatggaacatccacggaagagcatacgtcaatcttctcagtaacgttctccctttttggttcagtatgcgcactaaaagcactggtaattggaatttcgaacgcgctatttatgcctgtctgatcagatgccaatgcaatattgggattccagggaccataaataggttcaaagtattttttcaggaaaagttctctatgcagcaaaggtaactgggaattagtatctacaaaaaacctggatatcataacttcagcggcatgtcgaggtggtagttccaatggatcaaagtgtggattgttttcagcctctgcatatccattgtatttctgttccctttgtttaatatcttcatccagaacgtcatctccggaatcttgacgaaaattagttgccgtgaagactaatttcgcaaaggaaatacccgatgaatctcctaaaaaagagttaaaactactttctctcatcgtgcccagcgcactgatctccttattacatcggcgtagctcttccgctcttgcatctgaagtcatagggctgcctgtctcgggtaataaagcgctaccatcttgtttttttgagtttaccagaaattccttgcgttgtacatttatagtctgtgggcttgccatagacttgctcgttatagctgaggatgccatagaattccctttctgaaccaaataatccgccaataagccattatgtggcaatattccctcttctcccaaagatgaaactgaactgtactttttcaaatcaaaaggttcatcatcacttgtagcaggtatatttcctcgtattttcgtgggatctactccatattctttcaacacacgcatcatgacagccaatctatcttccagaaaaaagacgtaagatcttggaacgtcctttccggtggctgggtccaaagaaacacatggtacctctaattttgcacacctcttacagctaggaaactcctgatcacatttaatttttttcaatcgacatcgtttacatgcagttctagatttggaaattcctatattaggagaatctcctctttttgataaatctgttctattactttttttggagttaaattttttctgcttcatgatttaatcatcatcttcgtatgttttatgtactctaaagggttactcctgtgcgaataaagcaaaccactttacgttactaaaatttttcacatttggtattgtgagtattttatgaagctcatcgcggtaaaagaaaaaaatagagaatctgtgattatagtttaaaaaggatgtagacaaaggatatcagcgataaaggtggccataattggacgaagacaaataattcacttccttaataatgaagttgggtattataccttaccaggaaggtactgatattgtttacaagaatgctctccagggtcagcaagaagggaagagacctaatttaccacagatggaagcaacgcaccaaatcaagtcatcggttcagggtacaagttatgagtttgtccgcacagaagatattccattgaatcgaagacattttgtgtacagaccgtgttccgcaaatccctttttcactattttggggtatggctgtacagaatacccatttgaccactctggaatgagcgtcatggacagatctgaagggttgtcaattagtcgagatggaaatgatctggtaagtgtcccggatcaatacggttggagaactgcaagaagcgatgtgtgtattaaagaaggaatgacgtattgggaagtggaggtaattcgtggaggaaacaagaaattcgcagacggtgttaataataaggaaaatgctgatgattcagtagacgaagtacaaagtggcatatacgaaaaaatgcacaaacaagtgaatgacaccccgcatctacgatttggagtttgcagaagagaggccagtttagaggctcccgtagggtttgatgtgtacgggtatggtattagagacatttcgttagaatctatccacgaaggaaaattgaattgcgtcctagaaaatggttcgccattgaaagagggtgataaaatcggatttctactgagtcttcctagcattcatacacaaatcaaacaagctaaggagtttaccaaaagaagaatttttgcactgaactcccatatggatacgatgaatgaaccatggagagaagatgctgagaatgggccttcaaggaaaaaattaaaacaagagacaacgaacaaagaatttcaaagggcgctattagaagatattgaatataacgacgtcgtccgcgatcaaatcgccatcaggtataagaaccagttgttctttgaggcaacggactatgtaaagacaacgaaaccggaatattattcttctgataagagggaaaggcaagactattaccagttagaggattcatatcttgctatctttcaaaatggtaagtacctaggcaaagcatttgaaaatttaaagccgttgttaccaccgttcagtgagttacaatacaatgaaaagttctatcttggatattggcaacatggtgaagctcgtgatgagtccaatgataaaaacacaaccagtgccaaaaagaaaaagcagcaacaaaagaaaaagaagggattgatactcagaaacaaatacgtaaataataacaaactgggttactatccaacaatcagctgttttaacggtggaacagcgaggataattagtgaagaagataaattggagtacctcgatcaaatccgatcagcttactgtgttgacgggaattcaaaagttaacacactggatacattgtacaaagaacagatagctgaagacatagtatgggatataatcgatgagttggagcaaattgccctacagcaataaagcagcattcaaagaagaataattaaaacacactgaaagtgtgtttcttatatatggttatacattcatgaagatgagttcgtaatcgttatcttcttcaaattctgaaagtgtaaggacgtcaccacttcgtagctctatatatctcgctccaggaattacaacgttgttcaaacatgtcccattggacgaatccaaatccattacataacatttcaaaatgccacgaacgttcctgaactggatgacgcagtgctgctttgaggatgtttcttcgggtataccaatgtctgcgacaacgatctccgttctatcgtcgagatctgtatccagactgtggcccagttcacgaccgactaaataacagctcctgccgttcaaatcgtatcttttccacggtcctttatccttgtcattctttctgtatatcactagttcatacatagtcctatctcgcgcctccagtcctagcatatccatgtagttatctggagaaatagcgtcctgcggctccacatgttttaaagctataccttctttgttattcgactccagctctaacagaccggaagggctgaagtctggcataatatcgatgtactgcgatttgaatttcttgtcatcatggccataatttctggtgttataaggtcttttgcgtctgtgaaacatgtctatacgcaaatggagtcggaaatgaagtacaccatgcttgctgtggcttttacgttataccaaggcttctattgtaggacgcctttattgtcaattatgtgaaaagaaagcaaaaaaaagaaaaagaaaaatgaaaaaagatgaacgtgtgaatgaaaaaaaactatttcgagatgagatgagattaaatgaacaggattaagaatacattttctgttgctaagagattaaaactaagcaaagttatgacgaactcagaattaccgagcatattcgaaggaactgttgatttagggattattggtggtacaggtttatataaccttgactgtctggagcccatcgctttgcttccacccatggtaacaccatggggtaccacatcgtctcctgtcacaatctctcagttcgtaggaactaacagccactttcacgttgcgttcatagccagacacggtattaaccacgaatacccacccactaaagtcccatttagagcaaacatggcggccttaaagaacttaaattgtaaagccgttctttcttttagtgccgtggggtctttacaaccccatataaagcctagagattttgtgttaccacagcaaataatcgacagaactaaaggcataagacattcttcatatttcaacgatgaaggcttggtaggtcacgttggtttcggacagccgttctctcaaaaattcgcagagtatatctatcaattcaagaacgagataacaaatcctgaatccgaagaaccgtgccatttgcattacgacaaggatatgaccgttgtgtgtatggaaggcccacaattctccacgcgcgctgaatccaagatgtacagaatgtttggtggccatgttattaacatgagtgttattccagaagccaaattggcgcgtgagtgtgagctgccttaccagatgatttgtatgtctaccgattacgacgcatggagagatgaggcagaacctgttaccgtagaaaccgttattggtaatttgacgaataatgggcgcaatgcaaatattttagcttctaagatcatcgtctcaatggccaaggaaatcccagagttcatgcatactggcgatgggctgcgcggttccatcaagaaatctatctctaccaaaccagaggctatgtccaaggaaaccttagaaagactaagatacttatttccaaactattggtaatggttgccgctaatcatatgtaaaatataaataggagagaaaacatatatagctatggaaagtattaaatgtttttttgctgtttttatattttcccccttggggactgtgagttcatcatatatgcatatttgctacttggaatgtagcccttcctagttacaggggtatgcggcgagttattgtcattgttagcgctcactaatgtgctactgataccgctatgcctctgcagtgtgccaaatacattctttgtgtgtaaggattgagattgtagtttcgtctgttcctccgccatttccctttgtcttgctttcaaaggcgtctctaagcctttgaagagatatgctggatgatttttgagatttgtttgaggaatatgtgttttgttctgtgccatttggctgatcttagaagtggatacgtagtgggggtgttgtggctgcaacccagtatcgacagatgattgcatgtctacccccaggagcttcttttgcctgtcagtgagattcaaatcacttactttgacggtggataagagcttccaaagagaaaacagtatattgagcgagattaataggtggaacaagtagtcaagaagttctgcattcaaccaactgaacgtggtgtgatatatgatgttagccttctttaacgtgtgaaatgtcaacatgtacagatggattctggatagccggttgcaaaactgtctcccaacatgagtgttgttccaaaagaacttgatgaacttcaccagcaggttccagaacgcaaacgcaattacgtttgtcataattctctgcgtctccatttccttgtttaccgttcgccgtgatagctccttgagcacaggactttcaaagttgcccaatttaaacattggtgtgtcattttgtgattgtgatgagggtttgctgtctgtgtccggcaatggtcccggcacgtcattatcgtccaggcccaattggcccgcctgaatcttcatagttccctctattatttttttgcctctgcggatatattaaaagtctgtatattgtcaagttcttataatataaatctttttgttcatcataaccatcttattaattgttattatttctatcattattactattagcacaaatttcattttttttttttttcatttttctttagactttagccctaattagacctgagaaatattattataacctgagaaaggtttataaaaagaacattataacctacaaaaaagatacttaaaccctgaagttaataggtttggaccctctttttttttttttgcttttttttagaaaacctcagtattcacagtctaaggaacagataaagagaagctttatgaaagcagtccacagtgccacgaactttgacatatataattgacttgtgggggctaccgactggcttatatttctaaaatttagagatttgattatctttttcgcagcgcgtaaaagaaacccacgaagcatcgcttaatttacacatattcttcgttctccccttttggagaggatttaagctaagatatatctttcttcgagcgcagtgctgcttttgagttctttcgttttaattttccacttatttggcaataaaaactgagtgaagagtgcttctctgtctgttttagggagctttttcagatcatcatcagatgggatttatagcaaatatactgtgctgttcttcagatacttccaaaacacatcgtcaacgccaaccaccagaaactaatcacaaccgcaaccgcaaccgtaagcacagttcaaacaaagctcaaactcagggtcgtaagcagaaggctactccaaacggcgacaagatgcaatattccacaccggagatccttttgtctagttccgattcaggcagcaatgcgggttccaagacaatgcaggagaatgggaatagcggcaatggaaaactagcacctttatcaagagatcactccaacaactcgtacgatgaggagaaagaatatgaagattataatgaaggagacgtagaaatgacggaggttaacaatgccggagaagaagaagaagaagatgacgaagcaaaagaaaagcaagaccatgtcgttcatgaatataacgttgacgcagatagaaattccagtattaatgacgaggcgccaccacaacagggtctgtatcaggtgggtcaagaagatatgaatccacaatatgtcgccagcagtcctgataatgatttaaacttgatacctacaacggaggaggacttctctgacctgacgcatttgcaaccagaccagtaccatgcccccggatacgacactctgctaccacccaagttgcaagaatttcaacagaaaaaatgtctgatattggatctagacgaaactttggtacattcttcctttaaatatatgcattcagctgatttcgttttgcccgtcgaaatcgatgatcaagttcacaatgtctatgttattaagaggccaggcgtcgatgagttcttgaacagggtgagtcaactatacgaagttgttgtgttcacggcaagtgtttcgaggtatgcaaacccccttttagatacgttggaccctaatggaaccatccatcatcgattattcagagaagcttgttataactacgaaggtaactacatcaagaacttatcgcagatcggaagaccattgtccgaaacaatcatcttagataattcgccggcctcttacatctttcatccgcaacatgctgttccgatatcttcttggttctctgatactcatgataatgagttactagatattatcccacttttggaggacctttcatcaggaaacgtgttggatgtggggagcgtgttggatgtgacgatatagatttctcagtaacataaaaagcaggctctttttattaccccccccttcggttatatgtttggacgaactcatgtttctctttttatacagaagacttcaccggatatttataaacttaatgaattaatttgcttattacatgtatcaattgtactttacgtgtaacatctacagatacatatatccgtatatactagcatatatataaatatatactctatacatatatctatttattatgcttttctttcctctttttatggcatattatattttacaaagaaaccacaaagaaaaaacttttacctcaccttgcattaggaaacctcaaattttctatcattggcttaccaattctatctataacatcatgcgcccataaaacgtccagatgggaatactcatcaatataccagattttgtacactgcatttgcttcatgattaatgaagtgattaattaatcgttcaccatctactaatctatcttgctttggaataaacattataatgtgtggaaattcttcactattttgtcttttcggatttaagtgtagtttgttgttatccaaattattgccactgtcatcatcattcttggcaataggaaaccatgtctttttatctggaaaaattttctctgcacccttcttaaaacttagcttattaggaagaggtgacaaccaccattgcattagtttgacggaaatatggactggtgaaaataagaaatttcggtcccttaaaactctatcccataagacatcgttccaatcaaataggtagttaaacatgatgtatgagaggaacgaaaaaatcttggtcccaaccattagttttctcattgtcatcataagaggtataaacgatcttctaccaaagtaccacggagaatcaataccttttgccattagcctcacaaatgctttttcatccaataaaggtccagggtacactgcaggtgccaaagcaacaaagttttccagcttatcgactaatttaaaatcacttgcgtatagtttctcaccgttgacaagccccataaacccttgtgttgtaccttgtgaatgcgccacgagcgatagtttagcatatccggtactatcaagtacataatttataagtgcttttaaatcgtattgaaccatctggtgcatatcccaatcccattttttggaatgatcattacctaattttttcatgttccacttggcatttaagccacatctgttattccccaaccaaacatcaaatccagattcataaaggaagtatgccagagattttctacctgaagatgcgaaggccccgcaactttgcaaaagaccgtgtaatagcaaaatgggttcacgtttcacttcctctacgccatcgtttaacctggacttgaagtgccacaaatcaatgataaaaccgtcgtctgtctccacctcaaattcttcaatatcaataccatactctttataatagtactttaagtcaggtaccagcttggtatcctccgcaagcgcaatgttttggaagggattctctgcagcatatggggcttggttcacattcgtttccattttaatattagcatttccatcaccgttctctgataaagaggcattactagtcatggacagcttgctagtcacagtacggtcatattcaatattattttcctgatcccgctgtaaatctaagggcgttgtggaagatattgacaaaggtctagagtgacgtgctggtcgtttcttcttcttgtcatttggctggatcttggttctcgaacttcttgtatctcttggatcatttttatgttggaaatgaactgtcacgtaattcttccatagtgacaaaatgaataaccccgtcataaacgaagtgagaattattgcgctcaccaaccgctgaacctcatcaaccaccttatttaccatgcttatcgtaaaggtgccacggggatcccaatgatagttgagtatttcccaacaattttaattatacctttgatgagaaacatttgcgtactatttgtgtgaaaaaaaatgaagaacttaatgcgcgaattattgggataacaacgccaatggtgaatcaaaatattaacaatgacaaaaagaatgggctatttttgtacaaaatactgttgcaaatatgatatcatatgaattccaaactcatctaccgaaaggaaaagatagctcattgaacgcttcatccgaaaacaaagaattgtatgtacaagccacgcactttaataacacaattctattgcaaatcagactaaatggggaaatggattccacctatgaggtatcttcaaaaggactaaacccaattctcgatatcaacgtaccactggcaggaaacctaggaaacacgggtggcgattatgacgatgaggaagaagaatttgtaagagaccatttatctgattatcaagtggttaccaagttgggagatagtgccgatcctaaagtacccgtggtatgcgtacagattgccgaactatataggagagttattctaccagaagtgagcggtacgatggcccaagacaacatgcaattcagcttgctgatatccatgagcagtaagatatggagagcaacgaaggaacaaagcgctgacgataatgattttggcaaattagtttttgtgttaaagtgtatcaaagatatgtatgcaaagtgattctatataaattagttatgcgttgtattatctatgactgccatatccaagacttgcacagttccctttttatcacatagggtcatcaaatctctataattgacaggatcgataagacctgtacatgtccaaggatccaattccggcttcgttgactctccaggcgatgaagctatcaatttactaatcttctcaataagttcgggttgtctagatggctcacttatggccactttgactttcatcttcgcccttactattggaataatttgcttagaaaccaataatttgatagcctctaaagcttgcaatttggcaggtttgttaataacagggctgaacttcagttcctgtaaagctttgtggatcattgtgggcggatatcttttctttgacacaggatttatacatttagcgctaactattgtaagcatttcgttattaactttattaagcattaattgtctttctttttccgataattgaatctctcccttatgcatgatctcctcgatgacatcatcaacatttgtagtcccgaaacacttttgtagatcttccttattagcaaccaagcctttcgaaacattcatgaaaacttgatgtatctgcagcacttcatccagatctttttcaattccttttcgatagtcttggaccttattttggtagcacgcgacttcaaatctcttgcgagccttttttaatctcactaatgaaacattagttaacttaatctgtcccgacggttgattgataggcattgcgtgttttaccttttctttctcagaactattttagtaaaaattttaaaaacttttactactgcatgaaatcacttaagttcggcctagaaaaattttttcatgaacattattatatatacaaggcactgagcaggacaatacacgctaagttttgttctttcatgaggtcataataagttaaataacagtcaatacataaatgcaaaactaaaagtacacagttttattattttcttttcgtcgtaatgtagtttttataatcagtcaactttttttttgcttttagatttcgtttgttccttttgtctttggatccaaagtttcttgaaaatgtagccaaaacaatgccagcaggaatatcgaaaaagatgggtataatataagtaaaaaaaaaattttaacaatgaaataatacaggagaattcgtggtttacaatttctggtttttttcgaaattgctatgtggcttctccaacaatgtaattgtaggcttttctttcttttaagtccgtttatcgtatacagaaaaagtgcaggatgttgtaagtaaaggtagtcagtcataccatcatgacaaaatccacctcttggcaaacatatctaaaatagctctataatggccgatgacacccaacactacgaagaaatgccaaaaagtgtgcgaacaaccaaaatagtcaacccaccatagagatttaaatgatttggcatgagacggacaggaactgcatttggaatgggctgttggcacctctctaaaatgaatttccctttgctttgtgatgatttctaaatcagtagataattcgtagtttgttggaatggtcttatcaacctgaacgtcagatctgaaccgttcaggaatgaacgaaccgtaaaataccacaccaaccaaataccaaacaacagatttgtatgtgacggggctaaatagcgttgcagcataatgaagatcagtcaaaaatatcaaatgtaaaaacgacaatacacccatagtagccagcaaaatgaagaatctaattcttaatggccttgcttcaggtctatcaaagcgaggcgaccaattcataaacacaccaaatacacccagcgccagagaaatactcatgtaagtgtacatcgcccagtaacatgaatacatggtaacaaactccgttgtcaatatcgaagctgtaattaagatcgtaataccgctatagtcgacacacgcaaatttagaacgtagcttcaagaaggacgttccgttgaaagtatgccaaaacacggagcttagcatacatttcaacgcagctgccaaaaacatgaaaacaatccatctagcctgtggtggaacctgggaattccgccaaacttcagactgagggaaatcgtaaattgccaagtagattatataaatggctcctaacaaatgagaccaaatatttgaagtttcattatgccagccgtaccagttaaagatagacaacaaagatttggaatgggtattgtaaaacctatagccatggattatgtatctgttttccctccatgggaatggcaactgataataatgtaaatgttgagtttcacctagactatacgctttgccatggttgtatgagtttataaaagacttgatatcggtagtaggattcaaaggttcttcaatgaggatttccgtctttaccatggattttctcattggaccgcaatagtctttcacgctggaaatataattgttttcctctttgatttttgtatcattgagacgacttgttggggaacgtaacgaggacttcgcttgagaacatacagttgaagatgaagacaccagtgaagtggatgtagaagcattgttaagcttgaaagtagcgactgaattcaccaaagtggctgcatctgaatctcccagtgaaaactgagattctgtattcagagacttgccactgtttcttttgtacacagaacttgttacttccttttcttttgttggacgaattatctccaaatcatcataccgcccactttcagagtgtttaacactttcatcaatagttgaaaatggatgaggaacgaattttgagtagttgtaattatagatggatttaccggattttttcaccttctgaaaattgtccacacccttctgctttagccttgatagagatcccatgggtgagggtatatactgagttaagcttttgcttgacgagtccatcatgtacttaatttgattgtctgttgggatgtgaactatttttcagcttatctgcgttgcagcttcttctttgtccactttacaatggctaaactttaccagacgacaaaacaagtgtagaatttgaatcaactgtgtcctaaagaaaaaataatgtccaaaaactcttattataaaacgagtaaaccaccacttcgctcgaatcgccaagctttctagatgtacacccacgctgtgtcaccttatgactatataccttatccatcaaacactttctccatttcctgcagggtaaaaaagaaaagtgaagtcaccctgcactatacgagcttcagcccataccccacactaaaacatttctttttctgcggcatttctttttttttcggtccgtccctgtcccttcccacgagaaagcgtaatgatcctcgaccctaccccacttccccacgccaattaaaacagataaaatttcttttgatttttcggatacgctaatttcgtagcaattttgaatgactagacatttgttggataactacatagtctcccacccaccaagatctgcactgccgtccgttagtcggaacactatgtgcggaatcatgttgccaaaaacaatctcattcgctagattcgcgtatctcgcccgattcaaatagacgggagtaccgaatttgtagtcttcgttggtctctccgtatttacttagataaggtgcagcataaaatgtacctcttttgccgtatgacagatatatcgcatttgtgccggtcattaagaaaactccgtaagcggaggtgatttcgcatccatttctcatatgatcagtacattccccctgtaaataaccttgcagtgctatgcttttttgaatatggcatttttggccacacaacaagcatactgcgatttcgtatttatcacatttattcgatatttcatcattatcaagggaaaatttggaaaggttcaatggtagttcgataagctggatatgctctggtgaaggatatgctcttgtgtttatgttctgcaccatgtcatatattacttgctgaattctcaaattatcattaccatcattatacctttctatattttgtgttagttcgttgtagaaaaaatccttcaaaaagtgagttaaattgggtaatttaaaataccggaaaataagctctatttcacgctgtttgacgtccatgaaattattgctgcggttattattattatcaccatcaccatcatcatcatactgaatgttgaataataagaaggttcttctacaaaaaatggacaatgactctagtaatagagagcatataaagtctttaattttctctaaacttgtaaaatcaaaccgaacgtcgtctggtttaaagagatcaacatactttttaaaagtattgaatagatatgaaaagcttgtcgatggttcctcagatccgtttgatgatattttgattttatttcgacagtctttgtaaaagtttactctcatcatatctcttgcaagcaacagtagtagttgatggaaccttcttttgaacatttcatagatacataggttaggcggttgcggggtttttcctccatcaatattatcaaaattttgactcatatacaaaagtagattcacattattaccctttattagaaactcattccaattccatattttacgagagatttcgctgctgaatgtttttgaattaacaaattttttgtaaataaacgactttagctcacaaactaaatgtaaggttaaaatgcactgactggatattctttccatattcactatttttccttcctttttgtgcgatcttaatctgagctcagtatttgaaatagtattaataaaaacactattaacaactttatatgcatcttcgatagtcgtgacttttttaccctgaagatcacctagaatcatcgctgctttaatacaaatagagctcattgggtcaaggttttcttccgcttcacttcgcttttcaatacacataaaaaactggctcgaagttctcttatctatatcatttgtttttggtagaaatgaattacttaaggaattgcatacgggacaatatatcaaccctgaaccatacgataatggaatattttttgtagtttggttttgtattccgcgaatcgacttcatatggccacttaaacatttggtatgagacccatgcccgcatgctcttaatactggttcacagctagtaaatttcaatctcgttccatcatcatcctgggggttttcttggattgcactgtcttttgtttgcttaccactgaacagcgaatttattctattaacatctgtaggattcgtaaaatcaattccatgatcacatatgttccgttcttggtatgaaaaataaacaaatacatcgtcatccttcggcatcttgcaaaatacgcaatcatcatcgcagcaactgttgattgtgttactactattctctgcatttattctagtgggagataaactaggtgatgtggttctgggtgtactaatatcggaagtatctacactattgttttccatgaatttcatttgctgttgagccaacttcttcattaattttttctttctcaatcgagcaagatgttttttcctttcaaattctttatccttgtggcttttatcttcctttgtaggccacaatattcctggtgtatatgacgtggtttgctccctcaaataactgtttacatttacgtgaggcgctgtttccattaaatacctgaaaatttccctaatcttaccatgagattccgaaaaattatccttcaacaaacagtaatacaggatagaaccaatgctgtggtaatgacagaattctgtgtccacaattgcgtattcatgccacagtatccccataaattcattcagattattaaccacgcataaatgaatcaaatgaaccactctcggcaataaattgtcataatcatattttataatgtgatctaaagtatttttcaaaaataaaccaaaagtattcactgatgatattgaatacagcccagaaaataatgtattcttcaacaaatctttaaccttttttgctggtacaaaagtatcttcatatttcattttcttcaaatttgccatattcagcctgatatttttctctacatcatacctcctactggaagacaaccctatataataaggatcaatctcatctttatacttttctttcaacacgaaaatgccattgtcagtcaagcttacaggagaagtgtaattggcgtatttttcgagatatatatcaaatgaagggtgcttggtgatatgttctggaatacagttaacaatttgtgcgtaagagcatgtatcaaagcaaagggcatgaattatttctgatttgaacgttctctcgaagccttcctttgatgatttcatgaccaatgatctcacttcagtaagcaattgaatcaataacagaatgcattcattaacaacggctacagttgtttctgtatcaggataatcatacataggtacaccatttgcccagtgcttcaaaccccaccttgagaggtaagtaaccatcagttcatcaggattgcacattgccatactaaattgcacattgaaaatgtcactaatataagtaaattctcgcatactgtattttgtatacatccgggcctggtgagtaattggagttccgtttcttacccagaaaccgacgtttatttgcccgattaggactagggttgacaaagcagattctgatatatataaagccttctgcttatcttgaaaaacttcgaagagattaatgtagtttgtcaaagaagcaggaattggctcatatctaccacattgactccattgaataacaaatttgaacaaatatgacattggattgaaaaaatactgtgtatttacacctacctggaaattaatagtctctgcgacataattgcatatcgtctctctgactgtagacaaagtcgctttgttcgaatcattttcattcgttgatgcgttatcaggtgatatagcttttctagaattggttagtgattcaaattccctggtttgagcaacatcaagtagtttaaggacgatttgcttacggaaagccgcatctttgaccaaagatatactacgtgtgtatccatctgtcattattagtattgatgagaaaaaaaaataaaatgcagaaaaatcaaagttttcaacctccacgtgttctttagtttcccttttcaatggcagcacgttactgaattcagagaaggactcaattattgcgttaaaaattgcctcatttgaaagtagttcttccggaacagtgttcgctgacattatcgtacaaaggtctttaaagcaaataattgtccttcgatttcgtattgtttcggtgggcaacttaaagccattgtataaagagatgggcaaatatgacatcaagtcttctggattgaatgccatgagagtaaaagcaaatctaatagttcgttcaatgaatcccgagcttatagtcatatttgctatgctggggtcttggaaagtgtattgccctaatatactcataagagttacctgacattctttagcatctgatgcaactgcatcatacaagaccgatagataaacatcaatatattgtgcggcaagaaactttctgctttcatcccttaacgagaataatgacgccatgatctttaacattttgaatttagatttttttgagaggatattaatagaattgatgataatatattggaatctagatccatagaaattgtagaaatggcttactgtgttcggcgaatgggctctgatcaacctttcattgtaattagtgagtatttttgaaattctttcgtcttcaatgttctctaatgaccaaggtttaaaccatgattcatcactatcttcgttagatattaagaatccacctaataagttaatcttagaaaagtcaggattggtatttgtgggagatactctcattttagaaaaatgggaataccaaacatctagcatggaaattctaagagcatatttattttgcaaagacgtggccgccttaaagcacagagaatataaccaatctgttaaatcatctgttaactttctcttgaatatatcatccgcttttcttacatgaactactatgttttccttttgaaactccttggctatttgatctatttcgaaaaaattctcactttgtagcacagtcactacatcgtgtgaatcttctaaagccttcgttattgagattgcatattcaaccggtgtattcaaaattctcgttattgtagatgctaaatccatgtagtgtacgttacactcttcttcttcgatttgaatagcccactccatatgtgcttcttttctcgtattggaccaattgttatcaaagaaaacaaaattttcatcattgaccaatggttcacattcgtgtttttccattatatcatcagtaatgctgttttgattaggatgcattagggaggatgcttttctctcgcttgaatgggcttctgcctcctctttgtatgaaacagttacatcaattaaaaaatccagaacataattcaatagggagattacgttttcatcatcggttacgttactattgtcgttagaaataggaatattatttaattcgttcttgcacttgaacgcgtcgcttgggtcattaaaggcaaaggggtcaccacaatggcatattctgccttctgggcgcattaccactttagcaacataagaatgatttacatgtttttctttatcgaaacaaagctcacatatttcatacaatggatttgtggagcacgtaaaacagtaataaattgtctcagaggggaagcataaacgcgtacacgctgttccaatatgcatattacccacagagtggtggtcattctcgaactccagggtcctccactttcttccatttagtatgtctctgtacttttcgttttcccaggcttcagaattgagtattgaaacgagagagcgccagtttatatcgttatcactatgcttaaggcgtagatttaaggttttccatagtaaataactagtggtttcgctatattcgcatttcgcgagtttggggagctcggtaagaaaatctcttatattggttatagacaggtcagaatcttccatgcgtgcttgttaagtagctattaatttagttaacgaatcttacctttactatcagagacgagtaaatgataataattagaaaaaaaagccggctcttttttttaaaaagcttgagcaactttttttttttatagagttgttagtaatatgccaagcaattgaaagtatgaatgcgttgattattgggtttctccccacagatgtacattgacgatgctctttattgatatcgcctaaaagttcaacaaacgccactggaaattgccgccgttgtcaccacaacgtgataagtgatggtgtgctttttgcacatctagtgaagaaacgggcaattaggatctaggaccagtaacacttgccccgcaaatattataacatgggccttatgattgctcggtttgttacatctaacatcctaagaagtgagtggcatgaatacgtagctatatgtagattgaaaattgatgagtcgagtcatcaccttcctctaaacgggggataaattttggcggtattttccctaattttattcttcgttatgtcagccatgtgagactaattaattcaagttttgacttacaattgcggcttcgtcggaaatcagtattacgtataaactgtgtaccataaaattggcgtactcggtattgtttatactaagccggccattctagtgatttcgcctctataaatggttgttattcgagtataatatttcaaccgcatcaaagaaagaggtagatagcttgcgttcaacaccgttcttttctttcccccttaatttagcgcttggcggttatgctatggtgacagttaacttttttaattataggatgacttgtcatattgttatatgccgcatacttatgtaaagtagttattgaggtgggggtgagcagagtaacgacaacgatggagttccgtaactaaccaatgcttaatgttggtaagtaatagcaaatatatatactacatagcttttgttatatgcatcattttatacgattcatgttcgacccttttgataaaagatgggatttttaaataagtcggtgggtgatttcgaatcatgaatagttggcagagcaggggaagtacgagcttctaaagggtaagatattgtatttcggacggaagcagcagaaacataacagtattgataaataaggcatgtggtcatcactttttggttggacatcaagtaatgccaagaataaagagtcaccaacaaaggccatagtgcggttgagggagcatatcaaccttctatccaaaaagcaatcgcatttacgtactcaaattacaaatcaagagaatgaagctagaatctttttgacgaagggcaataaagtaatggcgaagaatgcacttaaaaagaagaagacaatcgaacaacttttaagtaaggtagaaggcacaatggagtctatggaacagcagctattctctatagaaagtgcaaacttaaatctagagacaatgagggctatgcaggaaggtgctaaggcaatgaaaactattcacagtggccttgacatagataaagtggatgaaactatggacgagataagggagcaagtcgaattaggagatgaaataagcgacgctatatccaggcctttaattactggggcaaacgaggtggatgaagatgagctggacgaggaattggacatgctggctcaagaaaatgctaaccaagaaacgtccaagatcgttaataataatgttaatgcggcgcctatctcagagaacaaagtctcactacctagtgttccaagtaataaaattaaacaaagtgagaactctgtgaaggacggggaagaggaagaggatgaagaagatgaagatgaaaaagcattaagagaactacaagcagaaatggggctttgaacgtgttctatgcggtttagatgaaagaaaaaaaaaaggtgttcttactttccatgttctgtatacgctcttttatatacatgaagttcataatgctaagtcataattaatagtttttatttttttgttgtcttttttttttgcgttcataggtatagaagggaatgtgcattcattatttttatctgttattgctatattattgtacagaaaagatgagagaaggaaaaaaaataaataatcaaatatgtatctttttttcttttactttgcttttaattgactaaaacccaaataacgaaaaatacaaagattataaaaaaaacctttgcggctaaccatctattactctttatcctgtcgaagtatttcaaaagttccctttgagcaccactaatgtttaaatcgatgtcgtctacgtttgcatcaatcctttggattacttcgccctgttcttgaaccatggaggccagttgttggaagagatttcccacttcctggattgtggattctattgtctccaccgccctatttctttcttgtaagtagacgttattggataactgtccctcttccattaacattagttgagagtcgttttgagggaaagacagttctccttggttggacgagttgttattcttttctgaggattcatctagtagtgaggtcatgaatgggttggagttgttatacgtggtcaagtccgcggcgtgattgctttgcgtttggtcatcagctggtgcatgtccagtgtcggtggttagtttttgccatctgtctttgttagccatttctagtcgttgcctttcctccaatacgtctttaaaacttcctgatatgtttttcatttgcgtgtttaaaagatttacgacatttttggagtgctgtacggcactaggttgcttagaagattgatttgatgtgttgccattcacgtcggttttcttgagctgacttaattgcactaaactttgttcgatggcataaatcttccttttgatcaaaaatgatagctcggcaatctctacagggttgtcattgaacatcggtttccttttggccagcactgctaatttcgataataattgtgcggtggatgaaatttcgtgagctatgccagaagcctttttttgaaactcagagacacttttcccattgccggttgtgttgttggcaaagttttcactttctttctcttgtagacgttccctctgctgttctctaaagtttttgtttcttttcttgtaactcaacacactttgttgaaattctgaagttctatcctttatgttcatgggagttgtgtggtatggtgaaatggtcgttggaaacagaggtggaataaaatatatacagtaaagagtgggtgatttccgttcaaaggtctaacaggagcgtcgatgcggcggtaggatttttttttttttttcaatttctatattgacattattatcataatgattgtttcgaatatgccctttcgcctcgcctcgatcaataaacctacccggatattacaacaacataataatacacctgtgaaggtaaagaaagagcatttctcttttttttatttttttttttttttactttctttacattaaaaaaaatatgaagagtgtaataggtaagtataagtattatttaatcattacaatttagcttcaatagtatagaagcgcaccacttcatcaatggctttagccacgtattccacgtttccttgattcaatccagcaatagaagctctacctgaggcaaccaagtaaactgcgtgggtttcttcaagtcgtttaaccatttgaggagtcaatcctgtaaaggagaacatcccgcattgatttactatatgatcccagttgccaggagtgcccaacttgactaaatggtctcttaatgcgtgcctcattttcgtaattctggaggacatggtaaccatatccttgtgccactgttccgttaattctggcgtttccaacagtttagcgacaatcttagcgccgtaggcgggtgggttggacacttcactacgaatgattttggccaattgagatgtaacagcaggctttatagttttgttttgagcttgttttgtaagtgctagatggaaacaacctacacgctcaccgtacataccggcgttcttggcaaaggactgacagacaaagacgggagagaccgttgaaagcttctccacacctagacgcacagcataggcatccttgtccaaatctccagtggcaaacccttggtaggcggtgtcaaataaggcgatgtggttctttgaggcgatagcatcaacgatttgaacccattgttcactagtagggtccagaccagttgggttatgggcgcaagagtgcagaacgaaaatggagccctctggagctttttgaatagcatttagaaagccgtttaggtccaaagacttagtttcgttggcccagtaagggtaagtcgccgttttcaagccttgattctcaaaaatggccatgtggttggcccaagtaggcttagacaaatagaccagtttatctgggaagaattttgaaaaaaacttcgcagatatatgaagagcacccgtaccagacagtgattgtactgagattactctgtcttcctgaaaggcatcggattgcgtaccgaagatgatcttggcggcgttagatgtcaaacttggcagaccggtaataccgaggtattcatggttgtaggagctgtcgttatgaattagcttttcggcggctttaacacttggcaagacccatggtttaccgttgtcgtctctgtaggccccgatacccaagtcgaccttggtagcacgttgatcttgcccgtacctttgcttaataccaaaaagggcatcagggggcagcaattcgatgttattgaacagagtggcagacattatcgctcttgtgttcttgtattcctgtgttcttttgttcattagaatttggacggttgcgctttcccttcttaaagtatccacatacgtttatataccgacgtgcaaggcgacaaggtaaatgaggccgatcacgctgactcactcggtccgactctcggcgatcgttattcacgaagacgaaagatagccatttccagtggtgaccattagtattgacaatatgtacatcgcattaaacagtaagaaaacattaatattccgtcaggaattcctgtaaattgctcttactacaaacctgcaatgcccatatcatcatattcaaagtaaaaatttcattttccgtaattattcttatctttgggtgctttgtggcagctactggagtaattgtgtataatagatgccactagtgcagttaaatgaaatatcctacattgagagtttaaaaaattgcctccttgtatgtttcttgtaaataatgattttatgtccttctagcgtagtaaccctaaaccatcagcggctattattaacattgttaccctgacagtgcttttttatttcaagaaaaattttcctttagattctctcgcctatataaacactttgaaactctcatcgtcgtgcatttaacttctatggtaaacttcttttcccattcaagtttctctttgcttatttgtaaaaaaaaaagtaaccatagtctcgtgctagttcggtactatacagggaagggaagtcactcgcatacgtgtgtgtgcatttcttgctattgctgcttagcttctctaaaacactgggctagcgtttttcaacgctcgagaggcagagtctcaaggagcctccaatgggcctcacgtattcatctagatggcgcttcggacaacggcatcacataagagatgcagctcctgacttctcctctgatcttcgtgatcagagttttgagtcgtcagactacgagcagtttctcttagtcgttgcatcgggtgctgttgccttaacgatgtgtatatggggttcgggggctgttgccatgatatatatggatgagacagaagtggccccgttgacgagtttaacttagattaagtaggacgcatgatcttgagctcttttcctatactttgtcctatggccagctttctccttattacgaagagattgcgggatgtgggtgcagagtgggaaaatctgagttcggtcatctttgttgttcgtcctaccgcagtatattcctaaacactatgaaatgaccctagttggtccatgatcatttgggtaaaaccatactgcagacatctctataattcacatattcacatcttgtcctctcgcagaagaggaaggcctttgacgtagaaaattaagtaaatcgtatacgtttacgtatatacacttgtattcagctatatatgttgtttctgttcttctcataaaatgtaccctacttagtggtggaataaacgaattgggttctccacgtagacgatatcaaatgaatccgccgcttggaagacaactttgtccatgacagaccccgaaggagccgtgatgaactttacaccagactgcacagctctataaacgttgtctgggaagggaaagaacgcatcggatgataacgatacattgtttaatttgcttaaccattctagtctttcttctttggtgaaaggttcagggacttcttcaaatttgctttcgtaatccaccttttccgggccttctattctttgccctgtaacaaaaagatcaatcgcattcgacttgtccgctctcttaattcccttggcccacttcatgttcaaaacctttggatgttgtctcaaccaccagttgtccgtcttgtcaccagctaatctggtacagtgtatacgcgattgttggccggccccaagccccacaaccataccattctttgcgtagcaaacagaatttgattgtgtgtattttaaaaccagcgtagcaacagttagatcgataacggcttgctcggtaagtgctttgtttttggagacaatttctttgaaagtggattggtttatgatcgcatcgtttctcttttgttgtaacgttacgccaaaaacctctcgggattccatttggccaggaacatagtttggatcgatttgtaaaatacagtattttccgtttttcttcttagatagtatattcaatgcctctggttcataccctggagcaataacaccatcggaaacttctttagagatgatttttgcagtggcgacatctacaatattggacaatgcaatgaaatcaccaaaggatgacatcctatctgcaccacgggccctagcgtatgcgcatgccaatggtgataaatcctccatatcattcacaaaataaacttgtctttccacatcggataatggaagtcccacagcagcacctgctggagaaacgtgcttgaacgatgctgccgcaggcaagttcaatgatgcagataactctttcactaagggccatgagttcaaggcatccaaaagatttatatatcctggtgtaccgcagagcactttgaagggcaactcctcctgctgagtgatataagcttgtgcaggtctttggtggggattacaaccatatcttagcggtaattgggctttcccttcggagtactgtttcctgaaaaagtcagaaatggccgcatcataatcggccgtatgttcaaacgccttaagtgcaaatctatttcttaaatcctgagaaatttcaccgtccttagacaggtcttgcagaaagatagaatagtcattagggtctgaaagaatagtcactctggaatggttctttgcggctgctctcaacaaagtcacaccgccaatgtcgatctcctctacagcttcttgaactgtaacaccaattttagccacagtttctttgaacggatatagattacatacaacaaaatccaccttatcaatgtgctgctcttttaaatctttttcatcgccctctaaatttctggcaagaatacctgcatgcacagcagggtgaagagtcttgactctaccccctagcatttctggtgcatgcgtaattgaagaaacatcgtcgaccggaaaaccagcttctctgaccatgttggccgtaccaccggatgctaggatacgaacattgttctctaccaatcccttggctaagtctaataaacctgtcttatcataaactgacaagatcgcagtcttggtatatttgcccatttttagctcttttgttttttgtccctatttatggtatatttggattctttgtttggaatggggtattgattagatcttgaatgttatctaatcgctaaaaagagcaagaaaaaaacacaaatgctgaaaactggaaaaaaggacgatctatttgccaattattaaggcttattcttaaagtggaaatagccctctcttttgcttttcttgagttttatctaatggctctaataaggaaaaacgggaagaaaaggaaagaaaaaaaatacaagaaaataaggtgcgactaaaaagaacatggtgttaatttatgcggcggagaaatttacttgagcgtaaagatattatatataagtattatggtagtgccaccacctatgtaagctgctagcattggtatacgtagaacaattaggactccctcgtccgctccttgatacaggtagataagttctgcctgaggggaggattgagaagagggggtaggggtttgcttgatagcagaataaaagtacagctctaggtctataaaaaaaaaaattggttaaagaaaaaatatacaggtttgtatatagaatcattaattaaaaagataatagtataaaacacatcagataaacaaaagtttgcccaataaaattatattttccatcaaccagcttattttctgtatctccacaaggacaaagtgttttgtctcttccaggtctttcttctaccagccttggtgttgttgaatttgtgacccttgttgatacctctggatttcttaccagtggcagtcaaacctctagcttcacggtgcttgtgaactgggtcacagatccagttgtaacgagcatctcttctgatagccttgtgttgagggtcgaccaagataacttcgaagtacttgtaagtagaatcttggttaacccagtaggagttcaagactctcaagttagcggcacgacgaccaactctttcttcagcggtagctctcaaggatctttggtatttcaattcattgacaccttggttagttggcttaccgtaagtagcaccctttggaacaggtctctttctgttaccacgtctaactctgacacggtagataacgaaaccttgcttagctttgtaacccaatcttctagccttgtctggtctagttggtctagcggctctgtgaatgacattcttttgtctgtattcccagactctgactctttgcaagaatctcaaaacatcagattgcttctttctttgcaattcttccaaatatttgtaggcacccattgctgatttatttgtttgatcgtggttttcttagattgtaaaagaattacttaaggatagggaaagaaacgtgagaaatagcagttaaatgtaccggtggtaaaaatgcaatgccatcattctttgttaccaagcaaaagtgagaaatcttgaaaaattttagcacctttgaaaattttgcgtcagctccaagaaatttcagaaaatatattcgacagctttaaatccgtacatttatcaaaaaaagaatataatatcatgtttgacgatgtatgctatgtaaatcatgtcataatacgcatcaattgatactacaaatgcatctcggatagagacattgtcatgataatcgcaacacatgtcgcacctggtgcatgttctgaaccttaacactaaatatttaaacgtcatgtagggtgcgagtccatctcattcttgcccaataaattttagaaacaccctcttatgaagggcggcaaaacatattaagtaagtgtcgattgttaaacacttcccctttttttatgcatagtaaaaggtacaaagaaaatagcgtaccgtccttaaatcaatatagaaatataatgaaaaaataagtgctttgataagaatatcttgaatacaaattaagaagtgtatatttatagatattttcgtttcagcttgtgtctgtgtgtggccttatatgtaatatatgagatggaaggtgaacaaattatggagtatgttcaagagacaccgatcattccaaaaaggattatccattattcgattccaaaacaaatgatcacaaagcccgctccccatgtcgagatgacgttggtagctaatacttttcgggacatggacttgccgcagcatccggttatccatgattgttggcaaaataaagagtactcaactcaaagatattcaggaaatgtggctcaacagagattaagttttgaggaacatccaaatgaagagtgtcaaaattctgttgggttaatcaagagagtgagtactttctttaaaaagaggccattgtctcgaaagaatagcataaagtcaatcggtgacgtaaaatcggaggcacgtaaccggggagaaggcctcctgggtgaagttgataatcttaacgagcagaatgtccgagaaaacctgactagtgaacatgaaaagagtcctgaaggagattccaaaaggtatggcctgttctcctttgaagagaccccccctatacaagtgttggagcagggcaatatcaattctgagctttcttcatttaaaaacacttctttggcggaaaacaaacgctcttctgacagcttcgtttcgttaaaaccgggtgaagatgaacatagccctttagagattagtacgtgtggtaatttgactgaaagagaggatttgcaatctggcgaagaacggtttgactcagcagcccaaaatataaaggtagcttcgatgaaggaaaaaaaaaaaatcttcaaagggaacaaaacagattaatcactgagattatacgcctcgaaaacatactaaataagcataggaaggctgaagctaagaataatattaacaaacttgaaaagaagttgagtgaaacagatggttttacatctgtaaacacatcagttccagtaactcctattatgccggtcttaaatacgagaacttcttatcccaatatcgactttcatggtactaaggtttctgatgttctagatgcctttgaatttgaaaagcatgatgatcccttaagggataaatggaacactttacagtttttggaaaagagctttgaatctaaatttgaatctgcatcagagttaatccaaggaggcgagctagctgctattaaagaaagaaattttcaattagccaaactaaataatctttgctttcgggtacgagagtccatcaaaagaagacaagacctggagaaaaagttaagaactttatcgcaggacactgacaacgaattgctttttctgatgttggaaaatgagagaagaaagaaaagttcagtgataatagagtttctttctgagataatcagagagaaatccaaaagattaactgcagaagagcaaggctttgtaaatcaaaatgaagtaaaacccctcattctggacctttctgcacggataaatagattgaattctattctagaaacaaaaaatacttgtattagaagattaagtaatcaataagtagttaaattttcataaattattactttcttacatgttagttggcgcgtcgtctggctgaaaattttacgcgtcataaacccttaacttttccacacattattccttactgctaagcgcattgctcacttgaaagtaaattatctacaaagttacattatcaaaaggccttagaaacacacctaaagtcttacagtatcacaatatgagtcatattgaacaggaagaaaggaagaggttttttaacgatgaccttgacacttcagaaacatcgttaaacttcaaatctgagaataaagagtcgtttttatttgcaaatagtcataatgatgatgatgatgatgttgttgtatcagtgagtgatacaacagaaggagagggagaccgatctattgtgccagtcaggcgagaaatagaagaagaaggccagaatcagtttattacagagcttttaaggattattccagaaatgccaaaggatcttgtgatggaacttaatgaaaaattcggcagtcaggaggaagggctctctttagcattatcacattactttgatcacaatagcgggacgtctatcagcaaaataccgtcttccccgaatcaactaaatacactctcagatacctcaaattcaaccttgtccccatcttcattccatcctaaaagaagaagaatatacgggttcagaaaccaaacacgattagaagataaagttacttggaaaagatttataggtgctttgcaagtcactggtatggctaccagacccaccgtcaggcccttgaagtacggctctcagatgaagctaaagagatcaagtgaagagatttctgctactaaagtatatgactcacgtggtagaaagaaagcgtccatggctagtttggtaagaatttttgatatccaatatgatagagaaattggcagagtttcggaagacattgctcaaatactataccctcttttaagttcacacgaaataagttttgaagttacattgattttttgtgataataaacggttgagtataggtgatagctttattctacaattggattgctttttaacatctctcatttttgaggaacgtaatgatggagaatccttgatgaaaagaagacgtacagagggaggaaataaaagagagaaagacaatggaaattttggaagaacattgactgaaactgatgaagagctagaaagccgctcgaaaagactggctctactaaagttatttgataaattgaggctaaagcctattttggacgagcagaaggcattagaaaagcataaaatagagcttaatagtgaccccgaaatcattgatttagataacgacgagatttgctctaatcaagtgactgaagtccataacaatctccgagatactcagcacgaagaagaaacaatgaacttgaatcaattgaaaacattttataaggccgcacaatcatcagaatctttaaaaagtttgcctgaaacagaaccttctcgcgatgtcttcaagctagaactaagaaattatcaaaagcaaggtcttacttggatgctaaggagggagcaagagtttgccaaagcagcctctgatggtgaggcttcagaaacgggtgctaatatgataaacccattatggaagcagttcaaatggccaaatgatatgtcgtgggcagctcaaaatttgcagcaggaccatgtaaacgttgaagatggcatattcttttatgcgaacttacattctggtgaattttcgctagcaaaacctatattaaaaactatgataaagggtggcatattatcagatgaaatggggttgggtaaaacagtggcagcgtattctttagttttatcttgtcctcacgatagtgatgttgttgacaagaaactgtttgatattgagaacacagcagtctcagataatcttccaagcacttggcaagataataagaaaccatatgcttcaaaaacaacgctaatcgtggtcccaatgtctttgttaacgcagtggagtaacgagtttacaaaagctaataattcccccgatatgtatcatgaggtgtattatggtgggaatgtttccagtttgaaaaccctattaaccaagacaaaaacccctccaactgtagtccttactacatatggtattgttcaaaatgaatggactaaacattccaagggaaggatgacagatgaggacgtcaatatatcttcaggcttattttctgtcaatttttatcgcataataatcgacgagggtcataacattagaaacagaacgacagttacatctaaagcagtcatggctttacaaggcaaatgtaaatgggttttaacaggaacaccaattattaacaggcttgacgatttatacagtctggttaagtttttagagttagatccctggcggcaaattaattactggaagacctttgtatcaacgccttttgagagtaaaaattacaaacaagcatttgatgtggtgaatgcaattctggaacccgtattgttaagaaggacaaaacaaatgaaagataaagatggtaagccattagtagagttgccaccaaaggaggtcgttattaaaagacttcccttcagtaaatctcaagatcttctatacaagtttctgttggataaggctgaagtttctgttaaatcgggtattgcacgcggtgatttattgaaaaagtactccactatccttgtccatattttaagattgaggcaagtctgttgccatcccggtcttattgggagtcaagatgagaacgatgaggatttatctaaaaataataaattggttacggaacaaacggtggagcttgactctttaatgcgtgttgtttccgagagattcgataactcattttctaaggaggaattagatgcaatgatacaaagattaaaagttaaatatccagacaataaatcgtttcagtccttagagtgctccatctgcacaacggaacctatggatttggacaaggctttatttacagaatgcggccacagtttttgtgagaaatgtttatttgaatatattgagtttcagaacagtaagaatttgggtttaaagtgccccaattgccgtaaccaaatagacgcttgtcggttgttggcattggtacaaacgaatagcaactcgaaaaatttggaattcaaaccatattcaccagcctccaaatcaagcaaaatcactgctttattgaaggagcttcaattgctacaggatagttcggcaggcgaacaagttgtcattttttcccaattttctacatacttggatatcctggagaaagagctaactcatactttctcaaaagatgttgcaaaaatttataaattcgatggacgtctctcattaaaagaaagaactagtgtattagcagattttgccgttaaagactatagcaggcaaaaaatcctattactctcgctgaaggctggtggcgtgggtttgaatctaacgtgtgcttcccacgcttatatgatggacccatggtggtcgcccagtatggaagatcaggcaatcgatagactgcatagaattggccagacaaacagcgtcaaagttatgagatttatcatacaagatagcatagaagaaaaaatgctacgcattcaagaaaagaagagaaccatcggtgaggccatggacacagacgaagacgagagaagaaaaaggagaattgaagaaatccagatgctgtttgaatagtcataccacatactcatatataaagactttatttattattattttcaacccgaaagaactaattattcttcagctacttcatgcaacttctattatcttccttttccgttacccgtatttttaagttgcaattattaaaaaaacaattaagaaaataaaacagcgccataaggcatggacgatagaaatacgaagacgaagaaaatcatcatcagtcgggatcaaataagagataattttgaaaatcgaaagttttcattatgacagaaagtgtaggtggaaataaactagtagattttttggtaaatgttcaatccattttgaatgctgcctctgtgaaatgtcatgtagtagatgaaagttttccagccaagttctttgagaaaaatccggataagatatatgaatcatattgtaaattcattaaaaatagaagtaactctgaaggtttgatacgtaatgaagataaattagttttgacaactatcaataagaggtttgaaaatggagagtacgaacccatacaaggtgggttttataagctgtatcacgacattaagctggtttgtacaatcctcattcacttttatcctcagggtacaagaaactaccaattagtcgacaagttctacaaattttcttcagagcttttattacgagaatgttgtaggataggaattgctctaacgcaaactaataatattaaatcaagaagtggtaagttgttgagcggaaacgagatggatgaatacgacgatgacgatgcaacagaactagacaaaataatctcttatgattttattaagatttctatgaattacacagtgccgatttctcaaacatatcagataagaacgaaggatatggaccttttttcttcgataatttctaaatctaatcttgacaaaagacctcatgaacttcctaatacaaacttcaaaataaacaacgtcttacctcaaactgatatagaaaacgaagctccaagattaggatttgtaggcgctaatactagtaatattccggaccctacgttaccaccaactgaaatgatgactagatttttgcatccaaattggtatgctttacctacaaccgtctggctaaaatatggtaattataattcttgggcaccttcctttaatgaaaacggcaccgttgtggattcgacaacaaggggtcttatttggcttgaaagaattggttatatggacttgtatgaaaaaaatgaaaagaaagtaaaacaagaagaattactgaacacgaatgaagaaggcataaacaggaagcagaacgatgaaaacaacaaaaatgttgacggcaaaagcaatggcgttcaggacgatggtggtgataatgataatgatgcgactatcgcttctgcaaattcagagagtactgagaataaggaacaattcataatcaagcttcaaaacttatataattggacaccatctaattacattggagatgacgaaattgagaactttcgaaatggcacaccagataagttggtttcagactctctcttaaaacttaaaagacttagaaaggagaggattttaaataaagttttgaagcctactacggaggaacgagaattatacttcaaagtgaaaagaatactaaaggaggttatcttagcaaagaaggtttccaaggttcctataaacaatgtaagggcctttccagtattacaaacaaactataatggtagcatacctgtggtaagggcgcaaccaggtcgtaaacggaaacacaagaaataaatagtgtcagcggtagtggaatcaaagataaataatgaattatctttgttttagtttcatgaaagctcatcaagtcttttttgactaatgtatgtttatattttgatattagataaagtatgcatttgttctgaaggctatgcatacgtaagtatatacttgggttgtattatgcagaataaagaaatgagagaaaacaagaatcgagagaaaacgacacacttgacaataaataggttccattaaaaatggatgtcggcacctaagagataggaaatcaccaaatagcaattcaagctcccgattaaagcccatacgaaaacagaggtataggtcaacaaacgactgttagtaaaatcaactattttactgtgcttggagttcaatggagtggtttcatcagcaatggcgttaacatcggcaggtgctcttaccacaccattttcgtcatgaacaaccatcaactttctatttgcggtaaaataaattaaaggagcggaaacgattggtaaaattaaggacaagaccacttgagaaaaattcaaaatatctgaaattcccttttcccccatggttaaagtaacaaataaacatggtacaatggcaatcaatctggtgcacaatcttgtggcccaaggtggtaaagaccactgtaaaaatccctcagaaacgatttgcccggcaagtgtacagatgataccggcagattgaccagaacataacatggccaatgcaaagattaaccctgccgcaggagatatgtagtggaccagtaatttgtaaatagataacaaatcagcatcctctgcctcaggttggcctgataaagtagcacctgcaacaattaaaatagcggaattaacaaaggtggcaattaagaacaaagaaatgattagttcagcgtacgcatagtttaacgtatattttatagcgcttaaacttgggcgggcattaaccttaccgtatttcttcaaatcgtaatcgtgcaatcttggtttaacaatggatgagcccaagtataatgaatgaggcatcacagtggcacctaagatacccaatgaaatgtaaagagcttgttgttccttaaaaatgatatttgaaggcaaaaaccctttaaacaattcagctttgtctgggattgaaactttaaacagctccaaaacaaagcaaatgcaagttccaatgaccaaaatcccaacgccaaattcgaaaaccctaactttttttaaggactggccgtttggtgtgtagaacattaaaattaccaaaacatctagcaccgttaataagacaccccaagttagtggtattttgaaaagaatttgtaaagcgatggcagtgcctacaacctcggccagatcagtagcaatgattgccacttcagcgaaaaggtaaagggtatagtttagctttttaggcaaattatgacgacagttttcagccaaatcatagccagtgatagtacccagcttcacacagagacattgcaaaagtacggcaaaaatgttggatataaaaatagagaataataaggtatatttgtattgagcaccaccggaaacactagtggcataatttcctgggtccatataagccacactgactaatatccctggcccaataaatttggcaaatttttgaagaatctgcatataagatcgcattttttttctcttgtgatgctactactgttatcaattagcttggaagaacgatatatttaaaggagttcagaaggaaataatagtttgggtatgacaactgaaaaaaaaaatgaactaatatataaaggaaccccgtatatttatgtggagtgatctttgtcttctagctcctttgaaataaatattcaattatgcaacctcacagaatcagatgaatgagatatatacagtataaatacctttagtcgcatgacaacaggatgtcgtaacaatgcaatattagagcatttttaagttgacccaaaacggaaatttcaaggtgcggaaactggaagagaggcagggcgggcaacagggtgcggttaccatgagttacaaacaatggtctattatgaagtaatctattgtgctgagtggtgatagtgcacccgatcatcaggggctgtctggcgtgaagaggcaccattcatttgtcgtggcttcaatgtgtcccggtttcttcacatgcgctcgcaaggcttgcaaaagactggaagaagggcttgtggcatcgtccctcgatcgtaaccacagagtttctttggcaaagttatcgctgtcatgcttaacaattttttcattcttcagggtatagacgtagttgttggtatactcggaaaaatgcatgagtttcggccttgttttgtgcatgcaggatgctttctttatataattatcagttactttttttttcgaatttcgtggaatggtcatgtccacggtattgtttcttttaccgtaggtttgctgaagctttattagttcctttttttctgtatttgaaagctgtctttcgttgggcattccccttttattggcatctccacagctagtacgtttggcctcaagtaagttttcgctcagtttcttgttgacgtttcttatttttgtgatcataaaaggattagaaatagaagcgtccttagaaagttctaaatcctcgttctctggaatagtttctatatagttataagttaatgacgagggtaatgttgaggatccagctcctgctacttcactattttcgcttagttcttgttggaaattatgtcgccaattagtactgtcctcggaagccatagacccggaactcgagcttctataacttgaaatggtcagctgagtttgttcgtcaagagctttatcctcgctaaattttgtaggtgaaggagtagcagcgacaatggtcgtattctctaagtttgcttcatcgtaaaaagttggtactatcaaatctgagtttttttgtgggatgtcagtcttgtctttaccactaacagcaccacagccctttgatatttcattctctgcgtcgggtgtaggtatcaccagtgcgggagaagttttttcgttgatagaaggctgaacatgtttatctcccagcatatttgtttcgatgccaattctctcctccaataacaactttaacttattctctatcttcttaaatatcacttcaaaacttttgatcatcacgtcatttttctctggttcgatatttacgtcaagaagctttgtatcgcaatttaaattaataaaccaaaccataggatctagtaaagagaaatctctatagattgacgatagtaacttagaaatagtcttccccgtctccaagttcaaagatagcgctctctcattaacagataaaaatttaaatcgtctctttatattaataacgtcagattctggcaccatcctcggtaagatcaaatctaaatttattttttcgtcgataacaaagttttcttctacaataaagttcagcggcacaggcttttttagtctagctagtagggacaaacttctagctctagaaatcttagggtctaacgtttcttgcatttgtttacgctctatggcaccatttttttgtaatgacaccaacgaaaaataaaaccgaatatttctatgaattagagaataatggtttattaaatagattagttcatcgaatgtttttcttggcctcgaagaaatttcgagataccttgctcgtaaccctcccagaagtttccttaatattactgtagtccccacgggacaagataccttgtacctttttccattggtaataccacccttactatcaactaaccatttttctccaatgacatcatctgcagtttttgtttcaacctgcattgagcctttctggttacacaagtttgacaaaagaaacaatgcttcacctctgaatccaagagtagtcagaatcgaaatatctccgagactactcatctttgatgtggtgtattccaagcacatagaaggtctgtcgataatatccacacctgatccatcgtccttgactgatatatattcacatcctcccgtagtggaatctacatcgatgaatacttttttagcacccgaatcgatgctattatctaataattcccttacagcagctaccggaccgtaaataaaggaactagaaacaatcttccattgggattctggagataactgatgtatagtcatccaaaactatgaaaaggcgtctgttcctcaaaccgagatgatgggatgtgaaataactttatatgtttataaaagtgattactttttcttgtatgggcgccaaaaaagggccatgtatatgagggatatggacgacagtgagattatttaaatagcaaagactacagtaaaagcaaaaaagcattgtgccagggcaatatagcgagcactacttaaacccaaattaggtgacaagtgaaaggtttgttatgcgcaaaacttatagataatgcagaaggtaatcttttctgctgtactatatgttcacattgcagtgttacgaataaatataaggatatatagctctgcttaaggggttttcttggaatcgagtcgagttattctagaaattgttaaaaataaaggagaataaaagtaaaaaataaatggacgcaaccggaatcgaaccgatgacctcttccttgcaagggaagcgcgctaccaactgcgccatgtgccctaaaacgcgtacaaaggagaggaaattatttgactacttagtactgttttcataggtaaaccctccactgtggctaagatgagtgttattcttcaacctcatagaaagcacgcatgttactttctgagatatatgtgggtaattagataattgttgggattccattgttgataaaggctataatattaggtatacagaatatactagaagttctcctcgaggatataggaatcctcaaaatggaatctatatttctacatactaatattacgattattcctcattccgttttatatgtttatattcattgatcctattacattatcaatccttgcgtttcagcttcctctaacatcgatgacagcttctcataacttatgtcatcatcttaacaccgtatatgataatatattgataatataactattagttgatagacgatagtggatttttattccaacataccacccataatgtaatagatctaatgaatccatttgtttgttaatagtttgaatgtttttatcggaagaggtttggtcattacgtctgcaatattctttttggtttcgatatagcatacgtgcagatgatttcctgatacttcatctcttagtctcattgctttagtaccaaaaaatctgtttctaaatttctcttcattattggatataattatactgattgtagatttactgtcggttagtaatcctttagtaattggtttcttgttaagttcttgcacaaggtgactgaggttatttaataatgggacagattcacttatcgcgtgtatttctgcttccgtagttgaagtacatgttaatgaagccttggtggactttcctccaattacttttccattaagtaaatatatgttgccaatttgtgatttataatacggttggttaccatacgatgcatcgcttataacaactaatttatttgttggcttaacaggtttgcttttgtgccatattaattgcttatctctcgtattccatatgaactgtatcaattcatatgtcatatctaacacttgcttggacggaaatagtatatgttgtgcaagtgtgttgatgtagtataataggtcaaatctaaatttatatccaacatatgatgctagacctatcagcttttgcatttcatgtaccttcattttgtaatcatcttcttctagctctagttcttgctggtctatatatagacctggttgacctggagcgctaagtttccttccttttgggttcaaaggtacgtttagtttgggtattttttcagttaatgagttttccatacctaatttcatgtatttacctctttgatatttgatttctaagccaagtatgtcgtactgaatttcgttatcactttcacccagatttattatctttgtatcgtattgtttcttgagtgttgttatgattttcttatttgcatttaagtctttgctgaacaatatcatatcatcaacgaataagcaaattgttacttgactattcttaaatacgcatgaccatccacgaacttcttccataccacactgttttatcaggtatgatttgatagtttcgtaccagttcgctccactttgtttcaatccataaagtgatttcttcaaacgtattaacttatcattcattcctaaatgtggtggaggtcttatgtatagttcttctttgatgtctgcatacaaatatgccgaagatatgtctaattgtgtaatatagtagttattgtctgatgcaagtgacagggatgtcattaatgcatagtgatgtacggtattggattgcatgcctgggtcgtaagtgtcaggatgttgaatatcacctcttgcaacaaatctagctttatgagtaccgccacgtttcctgttaaagataaacattgaatttattactcttttggggtctatttcttttctgtcataatatctgtcagtgtcccaagttttcatcttcaacagttgattgacttctttgtggtatgcctggatatatttttctttttctttaatatctttattataggtgattgcctcatcgtatcgtaaggtagttcgtattggtttgattgattttactgcttttacagctgcaatcaggtgaattcgtttcttcgatctcggaggttctaaactacgcatattcttagtattccatgtgtctcgtgataccttaatttcagtttcattatcttctaatgatcttttcttactgttgatagtagtataggcattagagtcaccaataccacccaaactggaattagtttgatgagaatttatcggtgggagttctttaaaggagtctgataattcggtaggaggttctggaggcagatcggggagtggaagatcagcgataatagattcctctgtattctccttaggacaggtatctgacgttttgataggaacgacgtggtgtagtgaattactttctgatgaggaagtatcgatcgaaggtgaacggtgtatgatccttttctcagtctcctgttcgcttgtctgcggaacagttttattattggtaccacccgtactggatattggtacgtttgtatgattagtctcattgtcactgtacgagtctgagtgtctgaaatctttagatttactggcgtgcgacgactcatgtgtgttagattgggacatgggagcaagtaaaggaacatctaatctatgcataccacccgaaccggtactctcgatatcggaaatttggggggtgctagatctcttcttagatggaagaatattagattcagatatgttggggtcaacttctctgggtgcgcgaatattggttttggaaacacgtttcgaatcttcagtatgagttgacggaggtgtggaatcggttggactcacagcttttgaaaggacatttctcggttgctcaggatgtagttcgatgtcagattggaagtcatggtcagattctatgttaagatcatcggattgttggatctcatttgacgcaatgaacgattgatatgaagcagttaaacggtttaagtcttcatcgaaagtgagtgcgtcgtaattgaattgatctaatctggattccttgccctgaagaataacatagttagttgtatctactgtcttctttaaggatggaagatagatgatatatccataagagtttcgagacggatgtagagcgtagcctgggatgccacgaggatgtattttggagttagggttgtgatcattgacgataacaggttgaccgaaaggtaacaaagtactgatatcaagtcctgccaagccagcatgttgtcttgcagattttttgcttttaggtgaagctagtgaatttctcacaatagtagaaaattcgattgcagagaaccataaatggttcggtaaaccactacattgcagttgagtacggcagtcatctaataaggtacggttgagccgttcagcgactccatgtgctcgggaatccgctgtggttgtatagcatggagttataccatttttttcaaggaatttatggagagttctgttagtatactcagaaccacggtccatttgtataaccaagacactggcctgaaactggtttttaataaaagctagtatcgtagtaaaaacatcgaggatagagtcctcgcgacggtcgtgtaatggataaacccaacggaattttgttgtctcatcagtaaatgagatgaaataggatggtgcactttttggtaggttgtgaactggaccaaatatgtcagtatgtaggtattgaaagggttcgtatgaattttggtattttagtcgtgaacctttgatatgtctgtgtttggtgcttttgccgattaaacaatcaggacattgatagtcaatagcactagaccagtcgacatctgattcgttaaaatacgtgatggtgttatttttaagtgagtatcgaattgtctgtgcattggcatgcgcaagcattcgatgaatgaaaggataaggatatttgcgtgtactttcacttgtatggacattattgatggtgggtacggagatatttgatggaagcaagtactttttagatacccagtaaaagtctccatattttacgataggtgcaagtacagtgccgtcagaccgttctaagacgtttttggtaaagcatgctgtgatatctactgcagccaattcattcaaactgagtaagtcataggctatgttaggagtgtgcaatacctttattgatgttttggtgttgtcctggaagtgaaattgtaggtcaccaatagcgttaattggtatatttcttttttgagcatcaactacgtttatgtcaggattagatgatgctgagtgtatgtgatgagcagatcttataagggttcgtgatgctcctgaatcgagaaggaggtgtccagggagttcatcatcagaatgattagtatgatttactgtagattcagtaagtttctggcctaagatgaaggtcgtgcttattgttcaattgaatcggttcagtagttgatttactgatggaatcgttgtccgtgctgggagagttattagatgtggatacattgtgagccctggctgttttcgatttcgaattatttgttttttgaggattccgagctataactttgggtttggttgtattcgtatagctgcgagaatcattcttctcatcactcggatttctcctgtaattaggtttgctgtttctcgatccctgttgttcttcataaatagcatggatatctaagaacagttcagcgactgtcatatttagatgtcgatgacgtgtgtagcgtaaaaatttatattcgccagatagacctctcataattaattggcatgcgaccttgttattgatatgaatgccattattgttcagtctgtcgataatgtttgtgacttttgtttcaaatgcatctgcaggtgtactgccattatattgcaaatttgccagggtcacaatgtcgtttgcctcttgggtatcagattgcattttttcaatacttttggaaagaattttcatgatatccgtataatcaacggataggatgtctttgacccaggtaggtaggaattgagagggagcaaatatttgaaaagtgttatacaagaaggtgagttcatcatcagtgatctgacgtacgggttttccgtttactgtcggaataataccaccgagattcgagttttgtaaaaatttgatgtatgttttaacccaatttggaaaatcattaggtgaggttaacattggtggtggtctgacatattttttagtggatgtcatatcagagtccgctgaggatgaatcagtaaatgtattacctgactcaggtgatggagtgctcagaggcgttccaactgatgatggatactgcggaaactgtgattgtggcccaggtggaaagtacataggcgacatttgataaggtgtatacggaatcatagatgggtgtccgtaaaatgaccaaccagatggattggcttggttttgggtcatcatgcactgctgtgggtacggcccattctgtggaggtggtactgaagcaggttgaggagaggcatgatgggggttctctggaacagctgatgaagcaggtgttgttgtctgttgagagttagccttagtggaagccttatcatattcttgaattttggaagctgaaacgtctaacggatcttgatttgtgtggacttccttagaagtaaccgaagcacaggcgctaccatgagatatatgtgggtaattagataattgttgggattccattgttgatagaggctataatattaggtatacagaatatactagaagttctcctcgaggatataggaatcctcaaaatggaatctatatttctacatactaatattacgattattcctcattccgttttatatgtttatattcattgatcctattacattatcaatccttgcgtttcagcttcctctaacatcgatgacagcttctcataacttatgtcatcatcttaacaccgtatatgataatatattgataatataactattagttgatagacgatagtggatttttattccaacactttcatacgtaacgggggtaatattactagctgttagaataagagtcaacgatcataattgactagtaacgcaaatactactaaacagatgatgttttagagtttcattctaacaaattgataatgtagtagaataatgaatgacaaagtataaaagaaaggaagacaaagtgattttattatcagaactatcaactccctttcgtgaattccaagactgttgaggagaacttctagtatattttgtatacctaatatcaacaacgaaatcccaacaattaatacgaagttcacccattttctgataattgttacgtgcaaataatagaactacttttgtcgaggtgtaatctcgtattcaaactatatagtaaattattctcaatggtcgagtaatgcaagaagatgatattgaatactttgcgtaactttaccaattatccaatatgcaacagtaaaatgataccttcacatttcaagctaattccaaaataatacatattaggtaaaatcctcaatttaattgcccggttttaccttcagacatcgctccctttccattgacacatctatacccttcaatgaacccgctatgtaatatcaacgcatcgtaaaaatagaataataatgcagtagtacatatccagcctagctgcaatctaaatagctgtgatagtcggtgtaaattaatagtttggtcagttttaaaaaaaaacctaattttggtacaaaagtagaagctgaaagcagtcattgataccaataacaaatactttagctgaaaccatttaggatacttttttctggcagcacagctgggacatactaccttcgaacatctctttggctttgttttattttcatttttaaaatgaccgttctttcgatataaaaagaaaactataataacgagggaaattgttaccgcccccagaatcatatctatgatcttaatgatgattgcttttgggtacttttcaatcaaattatctactgatggcaccataaaacaatttataaaataaaggctacaaacggcctttgttaatttttctataattaataaggaattagactttgggatctcatcttggctttctgtcgcactaagttctgcctctttcattatttcctatactttgaaggagaaagtaaactttaacggcaagttcctgtcttaactaccttttagttctcgtgtgttgtgaagggcctttgaggaaaaactcgaaagtttgttccgtacttttaaactttcaattttttaccaaaaaggctatttaccgctttatgggaagatcatggcaagtcaaatccacgttaaatggaacaagattaacttgccacagatcaaatgctgaattgaagagaagttttaagcattaagattcttaatatgatcattaatatatcagtacgtgtctcaactggaatcgtataaggttcttgtaagtacaaattgtatgcagaaatttaaatgcgagaacaaaacttgaatctccccccgcatttaaaaaatatctttttgaacacagtgcaactgattaaaagtacctgtaatacatatatatgtttgtatacgtatgtatatctaattatttcttaccgtcaaatcataattatttttatccgttcgtaaagcaatccagtgctaaataccaattgtgaggccatcggcttagtttggaacagcagtgtagataccgtccttggatagagcgctggagatagctggtctcaatctggtggagtaccatgggacaccagtgatgactctagtgacttgatcagcgggaataccagtcaacatagtggtgaaatcaccgtagttgaaaacagcttcagcaatttcaactgggtaagtttcagttggatgagcagcttggaacatatagtattcagccaaatgagctctgatatctgagacgtagacacctaattcgaccaggttaactctttcgtcagagggagataaagtagtggtggctggggcagcagcgacaccagcagcaatagcagcgacaccagcaacaattgaagttagtttgaccatttttttcgattgaacttttgtagatctttttagtgaagatgtgagctcactcgaatgtaaataacaatgccaaattgtcggaaagagttaatcaaagctgctctatttatatgccgttttttaataagcgacggacgaacagataaattgttgaatagctatttcactgctgatatttctcttacttgggctcccctatcccatactcttcaccactacaaatatgcagttgccctttcttcaacaatgctttttttatagatctcgtatacggatccgcgcctttgtactacctatatcttattatgatatatacaggagcacaggaatgttcggtacagggatgatacctttaaaggaagttttggcatgccttgacaacttcaattaatctttggccaagaaaatgaaccagaaatcaaattttattctgtgccctctgaacgagggcaatatccaatgtttgacactaaacggttgtcaggagaaaaattgaatgtttcccaaatcagaaacattaaaatccctctatatgatcagaggagtcgtacctgttagggtatgagcgaggaaacgtgattgagagttataaactgaccatacgaagagttacggccattgattgggttcatgacacccagggaagtttcttttggattaaaatcacaagtcttgcaattgctgtatgtattgcatgagtgaagtagttggcatctaatggatacccacttagggagtttatggatgaatcttgtcttcatagggtagctcgagagtgttttttaatctagtgatatccacttagctaagcgcggctggagatacaatatttacaaaggcaatttcaaaagtaggagcgttttcaaaggcctgctccattctccgttgaggtagtagaagcaaatataaacggttaatcttgctgttttccttgttttgtctgttggttttcacttgctgaagcctgtggttcaacagtactcggagaatcggccttatctagtctccttctgacctgtaatgcgtaaaattacgacaaacgtatttcgtgaaacaattgataggaaaattgtcatttgcttgttaaggcagtgcattgaggctctttaaaggtactttagaagtttatgttactatccttctagcctgatagaacaataagtaaagaattgacattcagaaatcagccatcatttcgtttagtagtagcaatcgcaagtagtgactgtaagagatagaaatgtgtacttcagtctggaactggggcgcttgtgaaggatgtgtgccgatctcaggctgttgatgaaggtctcttcaaatactatattattatcttttagtaggtcccaggaagtgccttattctcaacatgttcagcgtttatctttctcagcctgaatgtatttcaaacgatgactagaagagattagtaccccttatataatcctcgaaaatgttgctatctcagtgaattgaaagttcatgctgacgtctttatcagcgttatccattgccttgttcttttcagtgcagtggcagatgttacgagggtcaaataatttttgaatatatatagaaatggctacttactataattaaaaataaatatgaaaaataaaacttcagtaccccacatcattctcatttttttctgtttgtttgatttttaggaatttggctccatcatgaacattcgttagcgtatgatatcactttttcattatctcctattgttactttacttttcatatagatatccttcatcccgtgtaggtctactacgcaaaaatgaattctagtaattaataataatgatataaaaaaggctaagtgcacattactaaaaacgaaactaagatccttagtctgagttgatatcacctgcgaaaatacctttttctctttgatcatcccatttttcgatccagtctaggggacataaggcgttataggtcttccaaaagaccttgcacggagcaaaatcttcgcccttcatattaacacacttgtgataatccacataagattgccaacaatgctttgtttggttttgttggggaaatctagcatcgaaaccaactgtatgtagtggagagttttcttgatcagccatgtctattatactgtatttatgtgcttgttcctatttgtgaaagcaaagatactttatgtattcttactaaaatatttgtatatctctgctaatcattttaatgcaacttttctatctggtgcatctttcatcaccttttaaagatcctgaagggatggggatatcgggcaaaactacgcgcgacgcatttctgaaaattgattggtcaatgttatgaagctatatggtaaagaatacatggtgtcatatagatttatttgaatctctcgagtgctttttgaaccaattgtgtgttgttttctctgtctaattccttgagtaagcgtattaattggaaacacatgtcccacgaatcggtagctttaattgggtctgtggcgtttgcagcacttgtcaccaaaagctctaagactttaagcattaattcttcatccttcaataaattagtgacagatttctctgacttttttgtagagttatcatttagagctttgctttcctcagtccctaaatctgatttcttaaaatgtagatcatctcccaaatctttctcatcgtaatttaaaaacactaacagaagtacgccaagcattttagcctcattttcttcgatacagagtgctaataaatctcttggtgtcatctttagattagtgaatagatggttccagtatttagtttcgatcttccttaaacaattactaataatttctaacataccactgtgggttggtggtgaaatattatgctcaggatcggtgttgtcatacatcttaattaatttcaggatatcatccaaagagtcgcttcgcagtattttagtagacaaaatcttttcgagtgcaaatttgtaaggctttaaaaaacgataattgtgtgaaatatcctccaaatctgtgttgtcttctaatttggctaagattaattggtcgaggtatatttggtgtttcaccaccaatttggaaaatcgcgcgttaaaaatgcagtgaagtgtatgtgttgtagctgtttctggggtggttgatattggatacaaatcttcttcgattggaatggaaactagtggctttttatcatcccataaatcttccaaagagtatacgacgtaattatggccttgaactacaaatatttcgtccctgataacatcgattattttttctatgttatccaacaaagttaaggtttgccagccccctccatccactttgccaagctttataaatttcctatcggcaaaaaataacaagccctccttcatgttaattatccactcaattttgttgggtaaaacatcaattggaatgttaattttgagatactggtagaattttttgatgatgtttaatccacatggatgtacagtagaaattacatcgaagacaattgtctgtgtatcagtaactaaaataatctcggcagttttaagcaatgcatcaggttgtttttcagaagcattgtgattcttggatttcattttcaacaacttataccgggataaagtattaacatgtaaactgaaaacaatcgtattctctggaacattgtattcccacatgacataatctgatagttccacgtccggattcgcttcttgcagtggaatctgcagacatttcagatttgttgagccatcatcattcttcatatgacaaaccaaataattatcacctagccaatgtaaatccaacacgttttggtcagcaaaactagaccacatattggtctctagattgtggataagcagtatgtttttgttcgacacataagtagcaaataacctcaaggaagaattaatttttacaaaagcaatatgattattgaaagtctttgtaggaagttttatgacttgtaaattatcattattgattgaagaacttgtcacaggtgaatatatgattacatcattgttcgtattggttaatacgtaacattttgggtttctgaaatcaaattgtgtttgttttatttcttcccataatttccaaacttgatattttccggaatgagacactgttattagtgatttatccaagcatacaaaatcagaaattttatattcagccgcctttttctcatttttatccttgctgttgtcattattgttatcaccattataatcatcttcgtcaaaatatgtagcgaatagcagattcccaaattctgtgtaaaaatgaatgttaacactatcctcagaaaccaaaagtaatattttatcattaattttatcgcaaagttttatcacaaatggtggtttccaagaatggcttacttttttaattcttgtatcaaagcagattattttttctttgtaaacgaccaccaggtatccattaacttctaggcaagtcaaaagttcatctggtgtgtccgttaacggtattgcttcaacagcttgcttttcaatgtctataatgcttacaatagtctgcttttcgacggaatcatgagataaaaccattaattgtttattacacacaattgtcttggatcccttcttcacttcaaccaacgagctcttgctaactttaaaatccgatattgtaagtatttgtaatccatgagggaataaaactatcaaaacttcttcataacgcccatccccgactttggaaaatgtcttgatgccaatcatgtctatgatttcatagtcaaatttaagaactacttttaaacgaagttctagttttttcacggggagttcatcaatgttttcttgattagaaagaaagtgtaaaaaccctttttccttagttatgccaaatccattctgtataattcttgaagaactatttttatcaaataccgtgagagtatcatcatcgttgttatagtcatattcagcactgttcgcttcttcttcactcattaaaagaggctctatgacgggtatgccgtattctttgaaaattatttcatttgtgcagttttttaaaatttggtatgttaaaaggaagtttttatcagtcattacgtaaaatatcagctttccctggtgccacaataagtattgcgagtccttttttgaaataagcccttcgatgatatcattatatggagctgatcgtttcattgatctgttatcgccaaattccttaagagaagccattgttcgttcatggctagctactagtgccattggtttgaagttgtaaatgagcactcttgttggggttagcatgataagaacattggcctggggtagtgtcattgattgaagaatattgcaatcatctattttagtaccctcacctaattcggcgttgcggggtggaattctaagcaattggggcggactgactggccataagtgcattttccacgtgttcagtttcttacagcttccggtcaataacactcttaccttacctttttttttgtagaggcatttaggtgtatttttttcagactgtttgatgaacatcaaaggcgtcggtattgccgaattaacatcaaagaacaaaagcctgccataaaacgacagaaaagacaagattttggccaagatggcaacgccattcagaagttataataatatgttaaaaataaatcgtttgatactgtacaaagttgatgttcatcgttgtcactaaaaacgctcttaaaatcgaattgtccattgaaaaagtacatacttatatacatatttgtataaataatacacatattataaaaaaagcgaaaagggatggcggacctcccatggaattaaattgtcaaatttggttgaggcacttaaagggcaactgcaaagattccgaacaacgccatggggaaatataagcttttggcatgggcaccattctgtgattgactagttctggatgttgaagaagagtttgatgcggatataagtgctgttgtactgttttcttcattagccatggaaatcatggactggcctgcgttcgctgtcgagaaaggaacagaattggaaacggagtttttttggctggcataagatgagttagtcatggtagcttctgtctcacctgttatgaagtgttggggaaggtatatggtggtggcggaggctttgtttagcaaagaggtataccatggaaaggccgtaatgaatgtttggaattgagtgaacggaaaactctgagcaatatcagattgtaaatctgctgttgaggccaaatcaaccatgtgatagtagtagtcagcaacaggttgaggtagggttaaatggttttgcatcatgtatgaggtatactgtggaaaagcggtgtcgaaatcgtttaaaaactccatgaagaatgccatgtctgcatctgcagctgcggacctggcaagtgtatcgtcattggaactagacgttaaagttttggcagcaaaactgtggctgattagaaagcttaccaggagaatatttttaatgagggagaaagaaggagcaaatatcattgatacgcaatattttcaggaatgttgtaaatggttcgtaactggatatcgaaatcacttgattagaaacaatacgccggaatatgatcaggtaaagcagaataacaaagaataaactttctcgattgagagtgtctttttaaatcatccaagctcttgaattttctagcatagccttggatgacagcaataaaaaatttgccaggatttttccctatttgggcgttcaatgaagataacgtttgaaatattaaaaactaaaaaaagaaaaaggtttgaagcaattaataatttattaagtttttttttatttatcatacttaagaatatggagaccacgggttttcttacacctgcgaagaccttgaacctaatatatttgtttaagaaaacaaataagcgattgtttctaacattaaaacgaagtaaagacatggcttgactgaacctacacctcctgtgcttgtacttgaacttatagtattagttgtttgagagctttttgtttcatttctcgacgaagaaggcaatggcgtgaactgggtgactaccgtagaatttgaggattggtaatttatagatgttatgacgctggaagtgacttttggtatagacgacgatgatgaagaaccggtgaaattagcagcagctaatgaaccagtaataatgctggaagaggtggtgcttggaagatgaagtagttgatcgttagaatttccagtgtcaagaaaggtgtattgcactttctgtccaagggcagtattcaaatcctgagcatttgaatctgtgagaagttgcgcttgaacaatgaacagttgtagtagcacaattggggcgaaagctaaagagccaaattgactgatcttcatattttttttgatttgttgacgagctataggatgatgaaacggagggatatcaaagtacgttcttcaagcttacaatttctcaaggtgctttactggtcaagatattcaatatatagctaaatatttatacaaaatgtttgttgacggtttgtttatagtgttttcaaaacaccacgaaaagacttcattcttgcattcttttttctacaagatgagtctatacatctgaaactgcgacgccattttttccgctgttcggggcattcttggccaaatcctcgaaagaaataaaacgtcaaaagtaaaaaaggtgggctagacgaaacgttattatacgtcataattgtagccgtgtatgagtgggtggaacttgtataaataaacaagttcttacttatcatattctcgcatgcaatgaaattctccagattatgacgcttaggtctggccagacggctaatgaggtccagaggaaatagaaggattgtaagcggcctccactaaattttgacccctcatacatgcttgttcaaacacaaaagattgaggttgaaaacttggcaagaattgggctaggagaaagtggccaggtgcttcttgttcagaaccaagcagatatgctagcacaatgtgcaccgttctatttttttctatagtgtgtttacatttcttggcacattgcgttcggtttcaaatttgtataattattattggagcgagacaggcgtttctgtaccgctgttatttttaacatccactgcgttttatgtatctctaaaattgtgcgttgcctttcttttgtttatatttttgttcaaaaaatgagttaataatgatttttcatcttcggcttaccggtcttgaaaatatttgttaagacaacagtggataaaataaaactaaacaactcaagcaaaagtattccacttcttaaacaaagcccaactgaaaggttgcgaaatactatgtcattttgatttaatcatctaatgctcgagaaaatttcagagccgtaatacttaagtaatcggaagaaaagtatctcattcttcatttttctccaaatatatacctcttgtgtgaaaaattaattgtttcctccacctcctttgtgtggtgggcaattgtgtgcttccgagtaaataacaaaacataaggataatatataattctgtttttttgtctaaaaaaggtaaactatatataacaaacacagtatagaaacacaatatatcggtcattgggtgagtttaagcattagcagcaatggcttgcttaatagccgctgggttggcaccaacaacctttgcaacttccttaccgttcttgaatagaagcaaagttggcatagcggaaacttcattcttttgtgcaacatcacccaattcatcgacatccaatttatagaaatcagcttgtgggtattgttcagagaatttttcaatcattggagcaatcattttacatggaccgcaccaagtggcgtagaaatctacgacaactagcttgtcttgagcaattgcagagtcgaattcgctggcagttttgaattgagtaaccattatttgtatcgaggtgtctagtcttctattacactaatgcagtttcagggttttggaaaccacactgtttaaacagtgttccttaatcaaggatacctctttttttttccttggttccactaattcatcggttttttttttggaagacatcttttccaacgaaaagaatatacatatcgtttaagagaaattctccaaatttgtaaagaagcggacccagacttaagcctaaccaggccaattcaacagactgtcggcaacttcttgtctggtctttccatggtaagtgacagtgcagtaataatatgaaccaatttatttttcgttacataaaaatgcttataaaactttaactaataattagagattaaatcgcttattgcttagcgttggtagcagcagtcaacttagcttgttcaaccaagttttgtggagcatcgaagactggcaacatgatttcaatcattctgatcttagagttgtcgttgaaagacttgtcttgggtcaacttgtcccattcaccggtggtagcgactctgtgggtttcatagtccttagcaccgaaagttggcaacaaggataggtggtcccaaccttgaatttcgttgtattgagcctttggaccgtgaatcaacttttcaatggtgtaaccatcgttgttcaagacgaacaagtatggcttcaagccccatctgatcatggtggagatttcttgaacagtcaattgcaaagaaccgtcaccaatgaataagataactctcttctttggatcaatttcttcagcagcgaaagcagcacccaaggtagcaccagtggtgaaaccaatggaaccccataagacttgagagataccgtaggtgttgtttgggaaagtggtttggttgataccgaaagcggaggtaccggtttcagcaatgacaacatcaccttcttgcaagaagttacccaattggttccacatccattcttgcttcaatggggtagaagctgggacagcagcgttagctggagttctagctgggacagcaactggcttgtaacccttagcggcgtcagcaatagtggtcaacaacttttgcaaaacgaatttcatttggacacctgggaaagtggcgtttctgatcttcatgtggtcggagtggaattcgacaatgttcttggtcttgtaagagtaagagaaagaaccggtgttgaaatcagacaacaaagcaccgacagacaaaatcaagtcagcagattcaacggcttccttaacttctggcttggacaaggtaccgacgtaaacaccaccgtatcttgggtgttgttcgtcaatggaacccttacccattggggtgacgaaagctgggaattgagtcaagtcaatcaacttcttagtttcagccttgacgtcgtgtctggaacaacaagcatcagccaagataactgggttcttagcatccttgaccaaagccaagatggtgtcaatgacttccttttcggattcagcatcgtttggcttcaaagacatgtcaattggagtttgcaacaacttagctgggacgttcaagtcgaccaagttagctggcaaacctaagtagactggtctttgggtgacgtaagtggttctgatacatctgtcaatttcagctggggcggtagcaatgtcagtgatcatagcagtggtttcagaaatgttggcagacattctgtggaaaacagtgaagtcaccgttacccaaggtgtggtgcaacaacaattgcttagcttgagcagagatggatgggacaccaacaacgtgcaaaacaccgacgtgttcagcgtaagaaccggcaataccgttcaaagcagacaattcaccgacaccgaaggtggtgatgatacaagacatacccttgatacgagcgtaaccatcagcggcgtaagcagcgttcaattcgttggcgttaccagcccatctcataccttcaacttcgtagatcttgtccaacaaggacaagttgaagtcacctggcaaaccgaaaacggtgttaacgttgacttgctttaatctttcgaacaaatatttacccaaagtaatttcagacattttgattgatttgactgtgttattttgcgtgaggttatgagtagaaaataataattgagaaaggaatatgacaagaaatatgaaaataaagggaacaaacccaaatctgattgcaaggagagtgaaagagccttgtttatatatttttttttcctatgttcaacgaggacagctaggtttatgcaaaaatgtgccatcaccataagctgattcaaatgagctaaaaaaaaaatagttagaaaataaggtggtgttgaacgatagcaagtagatcaagacaccgtctaacagaaaaaggggcagcggacaatattatgcaattatgaagaaaagtactcaaagggtcggaaaaatattcaaacgatatttgcataaaatcctcaattgattgattattccatagtaaaataccgtaacaacacaaaattgttctcaaattcataaattattcattttttccacgagcctcatcacacgaaaagtcagaagagcatacataatcttttaaatgcataggttatgcattttgcaaatgccaccaggcaacaaaaatatgcgtttagcgggcggaatcgggaaggaagccggaaccaccaaaaactggaagctacgtttttaaggaaggtatgggtgcagtgtgcttatctcaagaaatattagttatgatataaggtgttgaagtttagagataggtaaataaacgcggggtgtgtttattacatgaagaagaagttagtttctgccttgcttgtttatcttgcacatcacatcagcggaacatatgctcacccagtcgcatgttgttaccctcatgaaacatgtatgagatattactttgaataggttacttgcatgcatttcggcgtgcgggtaccacctctttgcatgagcttgttcctttttcaagttgaagactatatattttattgagtttatgttatggggaggctaccctttacgtcctggttgtcccttcccgccttgatttggccttcattttttcaattctggcctttagggtagatgtcactgcagcggcacgtttataactttcttctgaggcaaaactatcgttgaaatcgatatccaaatcgtcggagacactgctcactccagtgccgttttttctgtacggccgtatgttaagagagtttacgcggtgcggcaggtcgccgatggactcgcttgatcttctttcatagttgacgtcctctttccttctgacatcttcctcctccttaaatggcaaagcggaagataaagattttaccccatagttgcttgacacggtggaagaaggtatggagtatgatgaaatcgtacccatcgattgcaagtttgtatcatttcttttcttatttctatccaattcgatctccatgtttctaagctcgttttctagtgacagtactctatcagacagcttattgacatcaatctccttggatcttaattgaatgttcttttcgttcaatttagactgcgcttcctttagttgctctcttagcatttcgttttctttaatcatttcgatcttataattttctgtattattcatcttttccaataggctttgtctttctttggtccatatcatctcatcattttgtagtttttgcagtctgtacttgtattcttcaatcaacttttcattcttgtcagtgctattagctactacgttttttggcgttgccaaagacttagacgtcaacaggaccctcgatttattgttagcagctaccattgatggttttgatgcggaggctactgaccctattgggttcactttacttttgttatcatttctcagcggtgaagatgccactctcttggagggaagtacagaactttttttcaggagaaatttattctccattggcccagtttgtttattcgtttcaatagtgctatgggtactaccacttgcaatactgaaattaggtagagttttgaccgtttcttcaatttttttccttttcaaattatccaagtgctctaatgttttcacaaaggtattcatgccaaatattttaattagaatggcgaaactctcaaatccaatagttcttatagcaggttgggtgtcgttgacgatctgaatcacaattggtaccacttcatccttcaagtatctttgcagggtcgagtatccatctttttcttctttcatgcttgcattaaacaattgcgtacactccattctgatttgaggtgtcttgtgcttcatatgctccaaaatatctttcaacatatcttcattgcgtccactggaggctaatggatcgtaatacttgcagatggttaataatgccttcctaatggcctctatcacagaaggtttcttttcctttgtcctgtctaacaagggagtgaagactagtgaaacataatccttggaaaagcctggtgtttttagtttgtcgcagattaattctactgattgagcggctagtgcaacagcttgaatgtttgcatctttctggataatatggccatatatccccaataagttggaataattttgcgaggtgctttttaacttcttagtctgcgatagaacactatcccaaaattcttccagcgcttccactctatctttccatttggacgacgttatcctttcctggaagtccttaggcagtttatcgaggatcgtctcctccggtagcatactgaaggtgtctatttgaactccactttgctgttttgatggtggcatatccgtttccatccccatcaatgtatctccatccttatctatctgatattccccctcatcattcgataatatggactttcttttcctggcttcctcctcttggcttcttttcttttccaattctcttttctcccactcgaataacattttcgatgacgatggctcgtcaccaacttttgcaaacaatttatgaagatctttcacttgaattggttttaattttttaaacagtatctcctctaacaagtcgctattgttgcccgtaaccttatagatctcgacaatcaaattcatcgtttgtgatcgaacgtttctatcaccatgaccggctagttgaggtacgtgctttaataattctggtagaaacgtttgaacgttcacattagtgagcccgaatgcagccatcaactcataaacacaattggctgccgcagcaattaattttggcagttttttctcgaaaaagggtattaccaattccaccgattgcgtaatagatgtatcaagaccacatagtgagagtatacagctcatcgactgcgtcttcgttgtagcccttgaggacgttaagcccttttccacaagcaatggtgtccatgttgatattaaagtaatattatgtgcatttttcaaagacgatgacgcaaaggcatctattaaactattcaaggcaacaatggcttgttcttgagcgaccacattagaatcagttatatattgtgcaaataatgtaggatccctccagtaaatttgtatgttgtcatccctactgatgtcgccaacggagtttctaaaaagctggtttaactccttataagcttctaaacgtgccttccataacttgtacgttaatcgctcttctaggggtaacgttgtataatctacttcttcttctcctgacatagtcaacttcaaactctttaataaaaactcaaaaatactttacactgtaaagatagctgtttctttgtagtttagtaatgctatttggtccctaggtctggtaggttcttcatttactcttcctatggagtgtcaagcagacaaaacaaaaacaaaaacaaaaacaaaaacgacacgaaaaaaaatagattcgttaaccatgataatctttgcaccatataaaggaaaagacaagattgacttctaatgcccagcacaaatattatccaactatttaattaataaatttttgactacttaatcttcagacacagattccttgtctaataatttgtttaattgaatattgacagatttatcctgcagcttgaacaaatttcttgcgcgaaaggttgctaggaaaatcaaaggtagtaaaaacattagaactgtatcgaaaacgtaaaggcaccattcgtgctgacctatatagctttgtaagcccattagaaattgtactactctgacaatggttctaccattaaccagcaatatcccagctaaaagtataaaattgtactggaaccattcattactatcccgcacaattttactaggcgttgccttcattttatagtgaagaaaaagttgactgaacgttaaaaaggtataacaaaatatctgaatgaaaagacccacaataattaggatacgcccagtattcctgctgttccatgaggataacaacccacctcctacagcctgtaggacacgcccaatcatatctgccactacgaaagaaactgtactaaatttcgcaggaattaacatatatgcctccataagaattagacgtgccattttgctgaacaacataaaaatactaagggcgtaaagtgaaggtgctatcaatagaagcaccgattgagcaatgaaagtcgaaatcgaggggctattgataaagactattttcaacacataacccacgaactctaaacaaatccctaaaacgaaaggaaaatgtgtccacatcaaaccgcgggcaggaaagtatattattgtggaattttcctctgacaactcattgttttcccagcgatgaatacgtctcttgctcgtgtgtgttgccattatgatctgcaccaaggcagaaaggattaaaatgccaaacagaacgacaaatgcaatcgctgcacctttgtgaggattgtatgcataaaaaccttcataatcagtgattgctttagtaaaaaaattcctattgaggcagttgagttcttttatcgacaataagtctctagtacagtagtgagagtgtcatgtattcagtaccaagaagaacttatatgccttttataattcatcttataagttgctagacatacaaataatcaatatggaaatgtgcttattcccgctaatatccattaatatccgctgtcatttttcgcaactatcaccaagtggagagaggcttgacaaccaccagaaaaaaactaaatcagcctgcggaacttttctcggaaaaaatcagttagaaaagatcgtacatagggcccttttttgacagtaagattaaagagcaaaacgggacattatagatatgccaccatcaaatacgtgaattttccaagcctcataaactaatagccaacttgcaactcttataatgcaaaactttctccgtgaaagtgtaaaccaccatctgtcgcccatcttttggtgctttcaattaagcctctagggcctgcagcgagaacccatacttgtgacaaatattcagcatggtctctgccttgattcgcccacctgcaacattgaatagaatccgtctctgcatcacattcggtttgcagacaccattcataatccttatctccaagtgtaggcctgccaaagaacactttaacacctgcgggaattctgatctttttaggcgccgcctctaaacaaggatcttgggcaggtggctcaatgatctttggttgtctgaaaacgctcgatccgttaaacgaagaatgtgtagttagagttccttgtgcagtatttttccttgatttggatctgctaaaagcatatgtaaaatctatctcgtcatcagcattgatgtcaggtatatcacttgtttttggtgggtgatggtttctcaaggtagatttcttacttagaagggctgtgttctcattgggctccgtaggttggggatttccatctgataacatggaattatctcccagttctgaaactcggccgctcgaagaaatactcctgacttcatcattaatatcagcagcgcagtcatgatagtcaatataatcaatttctatgtcctgttcgttgccttcggtgccactaatatatatctccataccttcaaaattgtttttgaagtggttcaatacttccagatccttataatctctagaaacccaaaggagcctaacgtttacaccgttgaagtttagaatacgaagtagtggtaagccaaaggaaattcctgaacctccaacacacataaacactctttgcgctttaattagaaaatttaaaggcgaatttattagtgcagaagaattgtttcgaaatggattcttggaagatttcgtggtaatattaaaaggaacagtaggtttagaaatgaaactcaactcaggttcaaaagcccctgtaatgtaatacttttcatttgtacgcaatggaaaatgcccgtttctaataattaacctgaccaaattatcacttggaatactagcaatagtaaaaggatgttggaagggtatcaaatgggagaaaaacctccttaaaaaatttctatggtaaatgttgatccttagatgccctcctggtaggatgggctttttgggtaaatcggttaatgggaactccaaaagagacaatgatgaagaaatgggtactatcgtaactctcgtaacattggtgatatggagcctatagacgatttgtcccgttaatatgagcacatttaaagtggtataatatgaaattcctgggcgagcgtgataatgtagaaacaccaaaataagccatgtgcttacatagtgaacatagtaaaaaactctgtagctccatcgtctggcatatctcacagaggtgatggcaatcagtaggaaaaggccgagggcaataaccccataaatgttgggtagttttctcattttcacgtataacgtatcattaatgtacatgtaatagagatagaaccacgtgtgtagaatagattcaagcacaacaattctggaaatccatttgtggagaggtaacaatgctaagtataacgtgtgaggtaacggtgatggcctcaacgttagaaatagtaaaggtggcatcaaagcaacggaaattctccccattcgcttagtaatttctaacagatctccgttagcgccttgtataacaaaaaacgaggtgaaaacaaagcatattaaacatagttgtagtgactgtttgtgatacatatgtgttttgtgaacccatgatcttctgttgaaaacatgatgctttaaatggtgacatattttgaagaatttgtcagttagcaacaaataattcattaagggtataataacacatattataatgaaagaaattaaaagacatatctgagaatatttgcggactcttaaagttctaaaatgcttgtccacgtcgacatcaaaactgggaagatgttccttgaaccagctaacgatggactttaaattcatgctgaaaataacaataaataaaatacagtaaacttttttagcggaacttctattgtaatttaacgatttaatctgaagagatgtagatgtaataaaactgttaaagtggcaacgtgataattaaaagcttggcaaaaataagagatcaacactagctttttctttttccacctaaatttgaagggaaataaaaaagaaattgaggctgtacagagtgttaatcttccataacggataccaccaaacgtttttaccctaaacttaaattttattacttattttacatgcataatggctgccatgcgtagttcatacatgttatttgcaccctttttctttttcaataacaaaaaagagcttgggcattacgttttcaacacttttaatatttccctttttacatccgtacatataaaatgtaaacccatgcattcatgacaattttacctatttcttaaaggcctttgtcacttctttatgggaatggcgctactttaattttccgcctactttgaaaaatttaccaaggcgaaattgagtgcgctaggcggaagttccagggcacggtcaccgaacctttgtgctgtttcgaacgagggtcccgctggaggttgacggacgcgggaggagctggaaagatggaatggaaggactgcaacactcagtaagaaggttcgtggtagggaacatcaccttctctagttcctgtaaaaataatatgatcaagtttgaatcctcgtattgaaaaatcgcgagttattaagtgtgtaatttagaataccgaaatagcacaagaagagataagataagatactgataggataatgtctttaccagctacttttgatttgactccagaggatgcccaacttttgttggccgctaacacccatttaggtgctagaaacgttcaagtatgtacacatatcccatacgattatgttctatagatgataataggtctcgaaaagaatatgtccccgatttaatcatatttggaggtcagaggaccaaaggtaatttcagaggaattttgaacacgccgggtttagaagagttagaatttcacttcttagtgagggtaaggagaagaaactcaataagaatatacatcctcgactgtgtcaaagattatgaactccgatgaaacagtaaaacgtcaaaaaattccacgggatataattcggtactttattggatatggaagaaaacattatatatgcacaaatgaacgctcttactaacataatttatctttcctctctttttttaggtccaccaagaaccatacgttttcaatgctagaccagatggtgttcacgttatcaatgttggtaagacctgggaaaagttggttttggctgctagaattattgctgccattccaaacccagaagatgttgttgccatctcttccagaacctacggtcaaagagctgtcttgaaatttgctgctcacactggtgctactccaatcgccggtagattcactccaggttctttcactaattacatcacccgttctttcaaggaaccaagattggttattgttaccgacccaagattagacgctcaggccattaaggaagcttcttacgttaacattccagtcattgctttgactgatttggactccccatctgaatttgttgatgtcgccatcccatgtaacaacagaggtaagcactccatcggtttaatctggtacttgttggctagagaagttttgagactaagaggtgctttggtcgacagaactcaaccatggtccatcatgccagatttgtacttctacagaaacccagaagaagttgagcaagttgctgaagaagctgctgccgctgaagaaggtgaagaagaagaagttaaggaagaagtcactgaaggtcaagctgaagctactgaatgggctgaagaaaatgcagacaacgttgaatggtaatcatttgaaaaccttgcaatgtgtgtgaatattgtaaggaattgagaaagagagataaaaaaagagacagaagtatcacttccttttctaatttttctttttcattttttttttaaattcatctatcgtttatctttatctcatatatatttgcttctctctgaagcgtcatcatctatctgtatttttaatgcaatcatagtataaaaatttttaaccaaattcaaaaattataatattttaaaagtttatgcttttgtccttttatattcaagtcatttggccattattacgcttttttttttattaggtaagtggtttcaataattaaattctttagcgggaaggctgactatctatagtattgaagataagttaaattaatgtttagttctgatatttcatttttattattaattaaatttgcactattcgccatgacgggttcacccgagtatttattttgctttcgttatacatatatatatatatatattcttccaggagaaatacctgccttctctcttaccccttgctcaatctaaatcaatccgtgaccttaaatcttctagcagaatgactaagtcacaatcgattttagaaatttgaataaccagctcagagatattactgacaaaaaacttgtaatggcactgttttagcaagtttaagataaatgtatccattaagaaagcattgattttattcggaccataataggtagtcactattagaatatctaaaagttctagaccaataccatctaatttgtgcttattcaatgcgttggtcataaaatttcttattacaggcttgatgaaatccattatcacatttaatttcaacttgtcctttaaatggtagtataagttaggaaagtcctgatagaacttcccctcagtaaccgtgtaagaattcttgttgtccttattgtcatcgaaacgactattcaaccaggtaacgtttttcgtcaaattgatgaaaatagaccgggatagagtttcctgctcttcgttgttacaacatttccttattgctagatacaatgagttgttcgcatactgactgaaaaatccggcttcgtctagttcgctatagtgatataaacatctcttgtatattggaagacgaaaatcgttcggtatcccaaaccaatataagttatgcttacttatcaccaacagcaggtccgtctcatcgccagatgtatgacaacttctcaaattgctccaaaacttttccaattttagttctcttcgaaataagtttctattttgaaactttaaatttaagatgttcctctttgtttccgatttaatgaggttttgtatggatggatcagtatgagtgcacaaggtttcatcgttattattggcaattaatgataacgattctttttcactattgattttccttttattttcctgaatcaaagaatctacactcaaatttttttgtggtctaatgactaatgaagatgatcctgatgagttcctgttgttgtttggagtaaacaaaccatcagaaaacacagaagacgcagaagaagatgaagaagagtacatcgttgatctgtgattcggcgaaggggccacaggactcccctgagagtttgctcgaggaatggcaaagttgtctattatggggacagcataactaatgagattagtatctttatctattgttgtgtccagaattgttgtccaatctgtggtcccggaatgtagggcctcttctttcaaatcgtttcttgttattctatgcctgctatggaatagccgctgactgggtggtacgtactcgtgcatgatattattaaccatgagttgtagctgttttgttatatccaaagaatttggctaacgtatccttgtacgcgtgatttatttatatatacgtgcagcacaatatatatatatatatatatgtatgcgtgcgcttggttatggctcagtaaagcgaaagtaacggaataagcgagggaagggggatctagcgatgagggaatggcagtaacagactgttcccttacaatacactcttgctaaattacatcaaggataatatactattttaaaacaaaaaccagccatttccctaaggacgcgaaacttttgtgacgcgtttcaaataaaaaagaatactgcaaaacgcagcacaataattagataaaactagtggcatatgtcactaattaactatatagtcactaatactgtatatatagccgacacaggctacacaaaacacaaacgcaaaggaattaggaatgtaggtaggtacaccgaggctaactgacacttctgggtcatggacaagcttgtttttagcacatcgtaaggaatgtaaccacgcttgaaaataacaacgatacatatcaaggtagttagagaggcattccagccatagatacgcaaccactttttcaatctgctatttgtattaacttgtaattcgcttgaattccagaatttattgacgaaatagacgaaaaggggtagttgcagaactagctcaaggactacaaaccagtatagccattctggtttctctgatagcaggaaatcgtgttgctttgcgatgtgatcactaacaaccttttgcgcaatccctagttgccatttagcgggaataaccactgatgagtcgatgaatatggtgatgggaatgtgaacgatgaagtaccacaagtagaattgttgctcacgatgtcctagcttcattatctccggtcgcttttctctatatgttttcacgtgagtggctcgtttctcgtacttatttgctgcggttgttccttttatacctactaattcgtatcctgtacaaaagccgataattctttactatgttttcaaaggttttttttttttaaacgatatgcaaattattaattcttttgaatatttctatgtaatctaaaccactttacaatatactatatggaatacgtggcgaagaaaattccattatctcacctccgcttctttctcatctctttcattttcttgtaatgtgccttcctaccgctcgtagatttctcctgaatttcgttgtatttacgcttgaaatacttattagaagcttcatcacccatgagtgtttccaaaatagtcgactttctttccttcctgttcatacgactactataaaactcactcttgtcttcaattatggtaccaatagcaaacctctctggcacctcccaacgttgcttcttataatgtctctttggatcaagagcagctctatgtttaatcagcaataaatctcgttgaacttcacgacgcatgttatcatctggctttggtaaggtaaaccagtcattatcgtttttgtcgctcttgttgggttttcttttatcttctgtctccacactaggcaagacgttcttcttcttcttcttgtttgctaaagcatcaaatccggtttctaacttaggaagcttcttaagattagtttcgatctcttgaaatttactttcaatttctacttcatcatcattattgcctatctgcaaaacatcctcttgttgaagagaaacttgttccttcgctgaattttttacttctagactggcactagcatctcttagtgctccaaataagtcttccacactttgatccatgtttaacagctcctttctcacgtcctctttaattggaaaacttgacgtctcatcgcattttctatttcttttctatcttctgttttaatatgctgaaaaatttttaggccggcactaaccacgaattatgataaaagagaaggatgtttagagaaaaggttttcgtgtgaaagggggaattgcgttgttaactgacatagctgtcttcaatggaatcataacaatgaagttcgaagacctcttggcaaccaataaacaggtgcagtttgctcatgcagctactcaacattacaaaagtgtcaaaactccagatttcttggagaaagacccacatcacaaaaaatttcataacgcagatggcttgaatcaacaaggttcttcgaccccatctacagctaccgatgcaaatgccgcctcaactgcttccactcacacaaacaccacgacattcaaaagacacattgttgccgtggatgacatatcgaaaatgaactatgaaatgataaagaattctccagggaatgtaataacgaacgctaaccaagatgagatagatataagcaccctcaagacaaggttgtacaaggacaatctttacgctatgaatgacaactttttacaagctgtcaatgaccaaattgtaacattaaatgcagcggagcaggaccaagaaactgaggaccctgacttatcagatgatgaaaaaattgatatactgaccaaaatccaagagaacttgcttgaagagtaccaaaaactttcacagaaagaaagaaagtggtttatattgaaagaactactgttggatgcaaatgtagaactcgatttgttcagtaatcgtggcaggaaggcaagccatccaatcgcattcggagcagtagccataccaacgaacgtcaatgcgaattcactagcatttaacagaaccaagagaagaaaaattaataagaacggccttttggaaaacattctttaagccaagattaacataagacaagtttgcaaaatccccaacttcacttccatatgcatattcatttaggtatatatcgtatatttgagaaaaattcatatatgaaacgttattaaaacatgaaaaatagaatgtgttatcgggcttaactatattctgccattcaatgcgtgtttcttgaccatctctcgcactacctctgacggtacatagaatgggttatgcttctttgtctttttcgtgtgctcatattgtctttggttctcgaactcaacctcctgggttaaatttatattaaagaacaagaaatcctctatgctatcattattatcttgagattccatctcaaatagttcagaaaatccggtgttcccgaggtcatcgtattgcaatttttgtttgtctacctcattactcaaattgctattggaggtgcttttgatagcatcactacatttattatgaagcatatccattaactccgtcctgagttgttccgacgtgtgtcaacaaaaggatttactaagaatgttgtattttgagttttaaaaggacgtgcatatgcacatacatatatatatacatatatgcgtatttatcatcactccgtgctgtttagaagctgcacatattatgcatctatcgcgatagtattgtgagttggagataaagatttaatcatttgtgcaacaaccgctttctactgtaggcatagaatttcgcgcatcccaccccttattaacaatcacattttttttttttaatattaatgactccggtggtcgtgattgtaatcttgataacaatcgcgatcatgatcacgttctttagcctcattatcgaacagtactggaggtgaataggcacaccgtttatctaaaagttccatgatcgtggattggtccctcaagatggaatcatacgtatctacaccaccgtatctactagtggtaaatctcaaaatatccccagtgttgccacggttcaaaacatcaatgtggtccagtaatagctcatacggattcgttcgtggacgaggcagtgctcctctatgaatattgaaccgatgtttaattttccacatctgagattctaattcagaatagtttcgacgtcttgcgtccaattctgattgcgtccttggtttaacttcgtaatataattgtctatgtaagtcttggtattctttggcgaacataaagtgatttgaccttaattgcaactccaagctgcttgtagtatatggtcttttcatatcatttgatttatccttactcgaccttttaatagaaaacctcctgatgaagtgtggcacagcaaccactccaaatttttctagaggctttgtgggctttgttgagcttcttttgtcaattccaaggcaagaaaagtcgtcttcatcggccaaatattcatcttcaaatgtatgtatcgtatcatcaggcaagtgtttatcatcgtagcctgtatctgctttagttggagattttactcgtttttgaccaccagatgtatttgcgtcgcaattgctaatgtattctgcacctaaatacaacttttctaagtccgctggtaaagctggatcattgacacccagtggacttgtcatcgtgaatcgttgtgttaaactaatgaaagaaccttcctttacatttttgtccactctgtttttgcctttatcttgatcctcgttatcaccatcggtaaaatcttggccgctattaattcctgaagcaacgttaataccaccaccaatcctgctgtccaacatcgacaaggcatgctcacaccttccaccatttattgatagcccacttagtgtcagtaacctcgtatagaatccatataggaaatttaaatttgaacacgaaacaccatactttttggccaaaatgatgggctgatgcaaaagaatttgagcaggatattcaaatcggtggtagaaacaataaggctcaaacggtaaggataaatattccggatgttcgtttgccgtagagttgataagttgcagttttttacctttgcaatattctacgattttcccaaaattaatctcttcttcaccttgtgattttactagcaaaaaccttgcaattttgcttccacattgtgcaaagcaaattccaagtaactctttcaccagatctttaaaaataatttctgtggatttgttttctaacattttctcataatcaaattgttcatagatgatagaaaggatgttaagtgagattttaggaataagcaattcccacattttcaatgccatttgttttgggtccaaaattaatttagatttcatccatttcgcaacggtcaatccaagaaggaacctgcgaacatttgaacccttaatcccttgcaattctaacgaagctgctttcgtgttttccagaatggttggacttgcttcaaaattagcatcacaataagttaatcccaaagttattacacattgatcgtcgttgaccaatgcatatgatccaagcgataactgtctgcattcaacctcacacgaaatggaaataacacacttgcacttccctccaaaataacttatggctatgggctccagttcgcaaccaaaatcagtgctaataagcacagtcgtattgtcgttcgtgtaatctgacaacaatcgacaagttgtttcgaaagactgtaaggaaattgcagacactaacacaatgtcaattgaatacgtatttgcaccgttatgttttaatttgtggtgcagctctttaatatccttagtgagaatgtttggcgtgtagaaattggcgcctagttttgtcgatttccaggcaactaactcgtcactagacacatattgcgagaccagtattataaaagagttgctcaaacttagtctccatcctagaaattgtgctgctggtgtttctccaactgtaaaaaaaaggaaatttaaatttacatttatatgttagtaaatttttgttcgaatgtctgttttcttaaacttctttgccatacctattaagcacgttaattggttttcttccataactaatgcgagttcttgccttcaaaaaaagaaagaaaggcttaggaatacaatttgaactagtatttgtatcgtgcgtctatgtgcttttgttaatatgaagcgtattattaactccattcattttacttttcattcaaattttgatagtataatatgcctttgtctgcccggaccctgaattactgacacaaaatgaagggatcagtggccctgaaaaaaaaaaaaaaaaaataaacggcgcgcggagtaattatgattatgattatggttatgattattattacaactcactattctaagtctatatcgtaaataagggtcgtgtccgtagaattcccctgccagcctctgttgccacttgtgcttattataaatcttgaagtggggtcgaggtataagtttgatataataccaccgtgatggcccggcacgatgaggaacggcactttagaactctttgtagtcgaattcgaagcatctactgcaatttcaacgttgtacaatctgatattatcccgcgatgcacatagtaaatgcttgttattaggcatggctttaacacaagagacaggccctgaaatagaaggcagtttcaaattatggataggtttcgagggcatcttcaagtcaaactgctccacacaggcattccttctccctgcatacacatgatcaccatctacaccccaacatgcggacaaacaccacggtgggacgcctgcacctctctccagagacaatgctggcgactgcgtcatgcgtcggtcccaaatatgcacggaaccgttcaaccctgaggtcataaaaacggattcatcatagactatgttcaaagattcttcagatatctgttctttgttctcttcaccattagaaccatcccccgtctcgacgggttcgttgccagcatcttgcttttcgtcttcgtcttcatcaccaaacagagaatccatatcgtcatctgcattttcattctctttaccactgttgacgttaccggacacatccacggacgagtacagcggccgcatttccaaagatgacaattcagaccttgattttttaaactcattaactatgtcacccgtctgcaaatcccattccaaaagacgcttatcccaggaaccactcaaaaacctgtcctcttgaccgtttaatctcagtatgttaacgatttgggtatgtccattcctgcccttaaaatagtgcgcaatgctcccctccatgtagcgaacgccctgcatggtaatcccaccattctgtagcccgctcagtataaagaggcattcgctttggacttccaaagaatgaacggggctaactttgggctcgtaatctgtcttattagcggagagtttcatttctgattttttctgcgggatctcattttcccagtacgactgcaagatacccgcgttctgaatagactcagccaacgaatgcttctgcaggatagttagagaaagtttcccctcaagcgtgttcagcaagtcgtacttccttatgtatccatcgctaccgcccaaaaacaggtacttgagacccctggacacggccaacgcattgacgtgcgtctggatgggtatggctgccgtggggtagatattgtacgaatccgcaatctgtgcggcattcaacatgtgcttatagtactcataaacctctccattagcagaggcttcgtgtgtagaggaagatgcttccctggaccccactcctccatcaacatcgctcaatttcacatcctcggatccaatcttagtaacagcatcgccactatcgcctgcaccgccagcaccagcagcagcagccttttgctcatcatgctggtgctcattcgtcggtgtagcagtcttatccattcttgcggcgtcgtcctcaccatcgtcgtcctcctgttcatcgtcgtcctctcgttcgtcctcgtcatcatcatcgtcctcatcatcatcatcgtcatcctcttcatcttcaccaccgtcatcattcccctcgaggtcctgctttgagtcgttttccagcccactcagcatctcttcgtcatcctcctcgtcatccaccacctggttgttaattagaatatcgtcaacctcgtccattacgtaaaagaagaaaaaaaaaaaaactgagcctttagtacactacagttactgctacagccttttacagcccagcatctggcaccactacgctataatatatgatgcgtctattatgctagaatccttcctgaaagggcattctggaagccctacgtacagagtgacaatatattagggcatccataaaaatagattagggcagctctgccatttttttcatagccgaaagaagaaaaactgaaaaaaaaaatgatacgaaaaaaccgcgaaacgacgccttttgttgcgattgtcgggcatcgcaagttacgacgcgttgtcccttgcatcgctgccgtgtggcacgacccactgcggcctaaacgaccgagatcggtgcccggggcagaccacccgaaaactcccgggcattatttcggtcgtttagttgcgccccagggcaaccggggtgtatacgaggccgatggctgcgataaacgaaaaattcaggctcgtataagtggcacaatagaaggtgaagaagaacagcaggtgcattgaaacaagaggttcagcagcgatcgggtattgttgttgctgctattatgtaacggtcgaaagaaacatcgcggtatatattagaggcggatttctatctttcttatcaattcgttttttcattcacttgttcattcattctttacatttgtcttgttctttgaagtggttgcagaggaggtcagtttgttgcatttgtaaaaaaagataataagaaaaatattcgtctagatttgagatatggatttggtcttagaagtcgctgaccattatgtcttagacgacttgtacgctaaagttctgcccgcttcgttggcagctaatattcctgtcaagtggcagaaattgctagggttgaacagtgggttcagcaattctacgattttgcaggagactttgaactccaagaatgccgtcaaagaatgtagaaggttctacgggcaggtgccattcctgtttgatatgtcgacgacgtcttttgcatcgctattgcctcgttccagcatcttgagagaattcctctcactatgggttattgttacgatctttggtttactactttacttattcacggctagtctcagctacgtgtttgtgtttgacaagtcgattttcaaccatcctcgttacttgaaaaaccaaatggcaatggaaatcaagttggcagtcagtgctatcccatggatgtcgatgttgaccgttccatggtttgttatggaattgaacggccattctaaactatacatgaagattgattatgaaaaccacggtgtaaggaagctcattatcgagtacttcactttcatctttttcactgattgcggtgtgtatttagcgcacagatggttgcattggccaagggtctaccgtgctctgcacaagcctcatcacaagtggctggtctgcacacctttcgcatctcattctttccatcctgtagacgggtttttgcaatccatctcgtaccacatctacccattgattctgccattacacaaggtttcttatttgattctgttcacttttgttaacttttggactgttatgattcatgacggtcaatacctatcaaacaatcctgccgtcaacggtactgcctgccacacggttcaccatctatatttcaactacaactacggtcaattcaccactctgtgggacagactagggggttcttaccgtagaccagatgactcattgtttgatcctaagttaagagatgctaaggagacctgggacgctcaagttaaggaagttgaacatttcatcaaggaggtcgaaggtgatgataatgatagaatctatgaaaacgacccaaataccaagaagaacaactgaatacggttgccttgtttgtctcatcttttttctttctttcacgttcaagaactttcacacaacgaataacgtttatatatttatatacacatacatgttttaagatacgcatatcattatgatgtacacctcacgttagtgcaatatgcgctattcgtatattaaatttttgcgttcatttaatggctctttttcctattctagtgaaaaaaaaaacagaaaatcgaagagctggaaaatttaagaacaggcaaataggaagctggaagctttaaaatgcccaagatttcggtgaagcgcaagtgttaactagaaaaaggccgccactactctataagcaaaaccttatgtccatagcgcgattagtatactctcttttcagaagagtacgatcggttctcttacttttcattaccatatcgctattgttttactatacgttccagaatgaaatcgatatcttgaattcgtacgctttaaacgactcactaccgtccataaacaactatgagcacaatacagaaggttcttcgaaactggatcctccagacctatcgtcaaccggttctgaccgaatagccaccgacaaggaaaatggcaacgttgcagtggatttgtcagatccagctacattgagagaaaaaaacaagtactttcccttgctgttaaagggatcgtctcaccagattggttcgaatttaccaatttcgtctcttttgacatataaggaaaagtatcccgtcttgttcgaatactcatcaccttccttaacttctataagccagaatgacgttcataagatacagccggcaatgcaattgccaccagatgttgatatgataaaacagataaaggacattttcatgaaatcatggaaccaagagcagttgctgctgaaaagtaacctcagaagggaatctacttggcccatagatctaattgattctctagatacattgtatctatgtggcgagacgaaactttttcaagattctgttaatataatagaagattttgactttcgagtacctccgttagcaatggaagttattgatattcctgacatcactacccgtgtcctagaagggttactgtctgcatacgaattatctatggataaacgattacttaacaaagcaaaacatgttgcagatttcatattaagatcatttgatacccctaatagaattcctattttgaaatatttttggaaatctgatctgagaaatcgatttccagaccgtactgttccatcaggtcaattgactactatggcactcgcgtttatcagattgtcacagttaacccgtttgaataagtattttgatgctgttgaaagagttttcaccactatacgtcaatcatataacgaatttgatatggagtttatgctgcctgacgtcgttgatgcctctggttgccagttattaactcaagaggaaattgagaatggtgcacacctaaagggatccagcatcatgaaaagtatcaatgaaaatttcaagttcgtacactgtcagcagttagggaaattcttaaatcctccaatagatgataatagcctccaagaacaatctcaataccaggcttatagaattaatgaaaaaacagtacccattctagaaaatctattcaaaatcaatgacctcttccaatcttcttatgatatcctggacggctcaagtaaaaatgctaatgctgcaacgatggaccccagtattggttcagaggtagaagcagtcgacgaaataattgagaaaagaaactttaaagacggtactaaaaaagattcgacaaaaaacaccgtaggtgataaatcattaatagactcgcaaacgtttttaacaaattccatcagtaacatttttaaattcatgacttttcgacccatgttgcccaagcaaacggaaaacaaaaagtttaattttctgaattccattctaacaaaatctcaattcatgcccacgactaatgagctagatgtcacgataagaaaatcttacgatgtctcgttatactcatgcagacttggcggcattctaggtttaagttcacgtgttccccaccgaggcggtgtcaacacgaaatatattttaccatcgtcactattggaaatgagcgaaataataacagaaagttgttttatgctaatggaggagttcgacgggctgctccctcaaaaattcgagttggacccttgcactgatgagactaatgggaattgcgagtttaacggcgaaactaaatcacgaatgattgccaacggcgaatatgaaacttttgaaaatgacctagatgtcgggatcaaagtttcgaattatgggaaaggtgggaatgaccagaaagctaagagaaatgtactaagcaaagatgggataacagagactcaaaacataaaaggtgatactgttggaagctcgaaatcgattgctgaaatagacggcgacgaagtaacgcaaatacgtagagtttttacgcttggtaaggatatcaaaccgcatattacaacggacgataccatgggttctcagtggaaaaaccatccagactggccattttgggtcaacaaggtagaatccagaagattgttggattcgaatatcattgaatctatattttatatgtacagaatcagtggagaacaaaaatggagaagcatgggtaagcagtcttttggaatcttaatgcaagaattaatggaactaaacagtggtgccaaaggattgtggcaaataaaggaattttatgaaaacggtgaaaaagtgaacaatgatttacctagctattggttctccagaacattaaaatactatttgctactattcagcgatggtgacaaggtttccctggacaaacacatcttaactcaaggagggcacataatcaaaaagaaatgaagttaacgttagaaaaatcgtacgcacatacatacatacatataggtacatatatacataatgagaagaggagaaaatgaatacttatacagtaatgtttatttttttgggattaagtgtcgttgtggtgatttctttacacagccaatgggtattcgccagcccagtcgtaaatttcctttttccaggtgttcaaaacatcagagccttcgtcgaccttggctttgaagtcctttaatctacaagcatcctttggcaagctttgttgaacttgttgagcgaattctacagccttgttaatgtattgaacaattctgtggaaatcttcttcacccattcctctagtggtcatggctggagccccaatacggacaccacctggaaccaaagcagatttgtcacctggaatagagtttttgttcaaagcaatgttaatcttttcacaaatgtattcaacacgagcaccatcaacacccttttctctcaaggatactagaaccatgtgagaatcggtaccgttggaaactaatctgtagcccaagttcttaaattcactttccaaagccttagcattcttcaagacttgagtttggtattccttgaattctggagtggcagcttgcttcaaagcagtggccaaagcagcaatggtatggttgtgtggaccaccttggtgacctgggaaaacagagaagttaattgggttttccaagtcgtatagaacttccttaccggtcttagggttgatagatctcacacctcttctgaagaaaatcatagcaccacgtggacctctcaaagacttgtgagtggtggtggtaacgatatcagcgtattcgaaaggagatgggatgacacctgcggcgatcaaaccagaaatgtgggccatgtctaccatcaagtaagcaccacatttgtcggcgatttctctcattctcttgtagtcaattaaacgacagtatgctgaagtaccagcaacaagaacctttggtctatataggatggcgttcttttctaaagtatcgtagtcgataataccggtttctgggttaactctgtatgggaaagattcgaagtatgtggaaacagcagaaatttttctgttttcagtagcgtaaccgtgagacaaatgaccaccatctggtaggtatagacccatcaatctttcatgaggcttcataatagcttgataaacctgcaagttagcaggagaaccagataaagtttggacgttaacaccccatttgtctggagtaacatggaaagctttcaaagctctttgttgacatagaatttccattctgtcaatgtgttcattaccaccgtagtaacgagcacctggataaccttcagagtatttgttggacaatggagttccaagggcatcgaaaacggaggttgaggtgaaattttcagaagcaatcaaatcgatggagtgcttttgtctttcaatttcatccttgataatggagtccacttcagggtcggtgtccaccaaatgagaggtgatcaacttatgatgagcgtcggatagagtgtaaggcatgttaaggaggattcggtttaagctgttatgctttgctatggggtagtatctttcgtaaaggttacactagaagaaggaaagattactgaacgcaaactaagggaagcaagttctgcattatatataaaacaagatgaagaagactcatggttcggtctaagatgattatgaatttaaaaattatacagagtaaaaagcgaacatgagaaacccaagagatagagtcaaacctttatggtcaaagcaacctgaaagggtcatttctcaccaggagtcatgtttcgtgtgtgaaatatttgaaaaatttcacttcttttttctttttttttttctacattaaaaatcggtgcgttgtcttttcaaagatgaggtagatgaagatggtgactccggctgttcagatccgattgactcgaccgactctgtttcctgtggtggcttcaagtagttgtccatgtaccattgcaattgagctatgctctctttgatatcactataagcagtgtgggcagcttctttttttggattacgtgcttgtaaagcgggattgtgtctgcgggcaacttccatgatgctactgacgtcaactattctgtaaaagagatgatcaatgaccttgggaaactcgcggaccatgaacaagcggtccatatgtacactattgcctgccaagacgccaacgttcttgtctgggatgtagcgctggatgtactcgagcagctcatcttctacctgggccaaagtcttctcacttgccaaaactttggcggtgagaccgctattaccgtggtgctcaatacaccactcgttcattttgttcatcacctcgggaccataatggatgacgctctcataatgcgagtctccttggccatcggccgctttgacgggtgccaggtgtccatcggtgatgatgcagcaaatctcgataattctgtcattcacgtggtctaaaccggtcatctcgcagtcgatccagaccaagggtttgaacagcttggttttaagttcgggtgtttgcgccattgattgcaggttttggatggttcgaggacgtaagtactgtgaaacggatcttctgtacagcgagaagaggtttgggcgagtgcgagctacgattcttgccggaaacaacaaccacttcatcttgatctcttctgtttatttgtgaaagctccttttcttttttttcattttctttgcaaatcgaaaagttcacactgattttttattagttcttttaagtgcccaacttgacaggaaaaagaaacaccccaaagggaataccagtgtatgtaaggcttgaattatacgtatgagcatgcgtttgatggttgtcgtcagagccagtgctctgagagtgtcccagatgactacaacccttgtataaaagtacatcttcttgattatttatcacgacacacgaggtgaccgattattcagaatcggtaccaaaaaagaaagaaaattgaaggaaatgaaaaattttcaatgtatttctcgaaagcctggagttgatcaaatgttcaaaaaatagggcagaatagcataacacacatcaataacaccgagccagcatgcctaccgtctccgtgaacaagcagcaattatttgatcttctaggcaaaaactacacttcccaagagttcgatgaattatgttttgaattcggtatggaaatggacgaagacaccacagaggaggccttgaaaaccggggaggagccggaattgaagcttgatatcagtgccaatcgttacgatttgctttgtatcgaaggtatttcacagtcgctgaacgaatacttggaacgtaaagaaagacctgactataaattaagcaagccaaccactaagttgatcatcgacaaatcaacggagcaaattagaccttttgctaccgctgctgtattgagaaatatcaagcttaacgaaaaatcttacgcttcttttattgccttgcaagataaattacatgccaatctatgtagaaacagaagcttggttgccatgggtactcacgatttagattcaattgaaggtccattccattacagagctctaccaccaaaggacatcaagttcgtaccattgaatcaaacccaagagtttactggtgacaaattgatcgagttttataaatctccagaacagaaaaacaacatagggagatacgttcacattattgaggattctccagtcttcccagttattatggacagcaaagatcgtgtttgctccctgccaccattaatcaatagtgaacattcgaagatctctgtgaacacccgtaacattttgattgatataaccgccaccgataagaccaaagccgagatcgttttgaacatattaactacaatgttctcacgttattgtgacgaaccattcacggttgagcctgtagaaattgtctctgaacacaatggccaatcccgtttggcgccaaacttcaacgatagaattatggatgtctccattaagtacatcaactcctgtcttggcctagatcaatccgctgatgaaattgctcattgtctaaagaagatgtcgttgcatgccgttcaatcaaaggaagacaaggacatcttgcacgttgacattccggtaactagacctgatattttgcacgcttgtgatataatggaagatgccgctgtcggttatggtttcaataatttgccaaagggtgagaaattatccaatgccaacttcattgccaaaccattaccaatcaacaaggtttctgatattttcagagttgcatcctctcaagccacgtgggttgaggttttaccattgaccttatgttcgcacgatgaaaactttaaatttctaagacaatccgacaatggtgatttagctgtcaaattggccaacccaaagactttggaataccaagttgttagaaccactttattgcctggtatcttaaagacagtcaaggaaaacagaaaacattccttgccaatcaaagtctttgaaaccggtgacgttgtatttaaagacgacaaactagaaaggaaggcgtacaatgaacgtcactgggctgccatctacgtgggtaagaattctgggtttgaaatcattcaagggttattgggtaaaatcatgcaaacttttagaacagagtggattgcagactacggtgctgctgcttctggcagaggttactggattgaagaagacgattctgtgaaaacctacttcccaggtagaggtgccaaggtcatgttcagatccaaagaaggcgctgagccaaagcaaatcggccacttgggtgtcttgcatcctgaagtcatgatgaatttcgacgttccattcgctgcatcctttgtagaggttaatgccgaagtcttcctataatgtaatgttctaacaaaaatttttactgatttataaaacttatatagatagatagacacatatatatatctatatatagaaacacaactaaagtttaccatgttttatataatattactaccgctactgagtaaatgtttagcttgtacttaactttcaaagacagtttttttgataaacatcagtacatttaataatacatccatacatttatgttaatttgtttttcctttccacctcagtgcgcttctcttttgaaaaaatcctcaacaggccacgcgaacaaatcttaccgagaatttcctaaaatgtttcaaactatcatttagctgcatacaatatgtacattattaattgagattaacaactttacctgtactttaccgttatcaaattataaaccaccaaaacaacagattaagaaacaatggccccaaacgtatgatactttaaaaggaatccacgcccgattacgaagtctatgttttactgttattgtaatgattgattgtacgcgaataacaaggaagatagtaaaaccaaaaaaaaaaaaataaaaatgtacgaaacgaagaagcgtctatgtgtttagttgcttttctgtattttaaaaattcactacttgaacattgaactctatatcgactcccttctttttatccgtttctgaatgtttttttgtttgagattgtcatatgtgattgttaatagcagtaggcaactttgtggtttcgggattgaaagaaaatcgtgaaatattcgttttttactaacattactgttctgaaaatttttactaattttcaatctttaatttttttgatatagacttccagaaagcaaaagattgccaagacctttaccgtcgatgtctcttctccaactgaaaacggtgtcttcgacccagcttcctacgctaagtacttgatcgaccacatcaaggtcgaaggtgctgtcggtaacttgggtaacgctgtcactgtcactgaagatggtaccgttgttactgttgtttccactgccaagttctctggtaagtacttgaagtacttgacaaagaagtacttgaagaagaaccaattgagagactggatcagatttgtctctaccaagaccaacgaatacagattggccttctaccaagtcactccagaagaagacgaagaagaagacgaagaataaattcattaatattattttaaatagagcataagttttgtataattaaaatcttctaaacctaataaatatgtttaatgaatgattcaatatcaaaaaaagaaatccattgggcccttagtgcatttttattttttttttttttttttttttttttctctttctgaattagagtacatctcatcgcagggtctctttttgcacgtttttgatgttgcttatgagacgctttgcctttttaacttcttcagtatattttaaatatataccaatttattcacaatatcattactcttctcagtttccaattaacatgaatcctaaaaaagtggcccaattgcccgttcacaataaatcaacgcttccaccacaggaaataatcgatctttttaaaataacattcttagaagagctatatccaaaagatcaagacaatgaaaagtcaccgttaactgaacaaatacaggcggtaaaatctgacctttataacagagattacaatgctgctttcaataacgactcgaaaagaatagcatattgttgtcgttggtcaccgtccagagcaacaagttacgcatcagtatttgcacatttccctgagcttctaaagattatcagatgcgaaattgatgacaaggactcaaatgtgctctgcataggtggcggcgctggtggtgagctggttgcattagcgagcatattcactttatcgagagatttttcgtctaaatttgcctctgctttgaaaatagacaacgaagtaaacaaaaagcctagaaatttaaacatacaactagtagatatcgccgactggtccacagttgttgaaaagctaacagctacaataaagtcgaaatggctatatggtgattcagaagcagagtcatttaacgtcaactttacccacaaggactgcctacaaatgacagagccacaagatatcaagatatatcaaggcctcgacctaataactctactttttactacaaatgaactatttacacagaaaaaagtggagagtataaaatttctgcaacggttaaacgagaactgtgccccaggctgccatcttctcatactagagagtgcaggaagctattctcacattaccatcaacaacaagaagttcccaatccaatttcttatcgatactatcttagtaggcaatagaaaggacaagggaacgacaggtccatggtcactagtatccgagaacgacagtatttggtatagaatggacccaaaactcgactactcgattccattggaaaacatgcgattcttttaccgtctttatgtcaagaactaacaggctttatgacgttttactgttctcttttcattgttcttttctcgaagagtttagaaaaattttttttcttctcatccacaccgaaaaaatattaataagagagttgaaaattcgatttggaatcagaaataaagaaggggccacgatcaaacaagactcatttcgaataattgtaaaaaaaaattagcacaaaacaatatgaccgttcccaggaatcgtcccatggcaccatttggcaccattatcaaatcaagaataaaacaaccccagttttattggtttataggccattttttaaccatctttaactttatacaatttcatctttcaatcacgtccaaacaaaaccaattgtcatgctatagaagatcattattttacatatccgttacatatgccatcgttctttaccagtttttcaaaagtgaccagttaaagttcaattttacgcttttgcgccaagagatgaagaaattggataatttgcagtattttgccatgctattcatactttttctcttatcacagtttaacatcataatcagcggctcgttatacagtcccgttatcttttcaatctttcacttcctgaactattttaaggaaaaccttttgccatttttgcctttgataccacttaatttgaaaaatttgttgaactccaaaataacggtattcatccaaaactacaatggatttttcttacagatggcgcaagtatttgagattatctgcggcctacgtgtgggcctcttcttagtgcccttcaattttttcttgttgttggtaagaagagcaaacgtgtcgtttgaggtagtgggtacaatgttggcaggactaacctatgtatggtttttcaaattaaggtacctacaaagtgaatctatgaggcagatatttaaacaatatgtccttaggttggatgcatatgtcagccgtactttgcccccatattgttcccgtttatggaacggctataagaatttcgttatgacagtgttttggaagatacctgtgtagcatgctcattttaagtatatctaaatattattttgtatatactcacactcctctatagaaagcaaaaaatttcaaaaacgtttgaaaagctttgtttaacgatacttgtacttaattttagagtcagtttcacccctcctctcccttttcatctgccttttggatttggattgtccctcattagcattttttgagcgattatctgcctgagtttgttgagcgccaggcatgaacatgtttttgaggccatataacttgtaaccagcatagatggggcacaatagtagacaccaccaaaatttgaatgtcctgaaagctataataccaatgttaccaaaaagtgatagatatatcaaatcaaaaaaatatgatatcaaatttgtattgtcgttcaagtctataccttgttttactacgcgattgccatcatatttgggcttaccggatagcacaatgatatacagagcaacgaacataggaacgttcaaagccaccagcttaatccattggccaattgtaaccttacgtgaaatgaatagacgtacgatagccattcctaaaaacaaagagacttgcttgtataagccctgaattatttttgcatttgaactagcctgtttcctccctgctttgccagccattctaccaacacaaacttagaccactgcctttggtgtcttcttgaagccacacgtgaatactacctttttttcatctattatctttttttaattacgttgaaatttttcatttcaaaggcgcagaacgaaggtcgactaatttcatgacagtcggtagacgtggagaaaaaagttgattgttaagcctattaagttccactgagacaaagacccacaaagctagctagcattgccgcacttctccagaacaatgttctcctttgtccaaagattccagaatgtatcgaaccaggccttttcaatgggaattgtaatggttgtattcatcatggcatcctcatactatcaattaatcaataataacgcgttctcagtacctagtaatatcgataacgtcaaaactttaataaatgttagaacaagtagatattttggctcacagagaggcaaggcaaaggaaaatatgaaaattaaatttgatctaaatacagatctcactcccctattcaattggaatacaaagcaagtttttgtctatctaactgctgagtataacagtactgaaaaaataacaagtgaggtaacattttgggataagatcataaaaagcaaggatgatgctgtgattgatgtgaacgatctaagatccaagtattctatctgggatattgaagatggaaaattcgaaggcaaggatttggttttcaagttacactggaatgttcaaccatgggtaggtttgctaacttacggtgaaactgtaggcaactatacactgaccgtggaaaataaaaacaaagtttagactagtctttgctctctcaatttttgttaattatttacatgattttttgatatatatgcagttgattatacaatatgatatatgcatttctagaatttactcacaggtaatactctcttagatttcctcagttctttaaaatatgaaagatgtctcatttcaatctgttcccatttattgatcttgcttcttggcattaataagtaatctttcataaaatacttgtaatttgatatgaagtcacgtacctgatcttctaaagtttttaaatcatcaataccgtccaaatatgtgtctaactgcctcattatactgttatatgtatcgctttttaagtatagtctgggctgaaatttattgggctctttttccttcatttttaatgttggccaagatttatcactggactgcgtcttatcctcggatagtttcgttaatagtctaaatttatggatcaaattatacccatgaattagtgtgtcatcaacgattttcataccatacgaaagggttcttggatccttaaataacgcttctacagcgctgttccacgatatattatctaaaataaaacctttttctcgcaatttcttccacagtaatggcagctcatcgattttattcattgcaatcaactgacttactttataagggaacaatccgctgaatatgcttcttagtttaatatttggcgttgtagatgatggcaagttttcaatgttttcaatacgatccatgtatttagcgaaaagtgtttcgaaatctttccattgttcaatttgagctagtaataccaacaatgatctcatcatcacaaatttattattatttgatatccaatcatgctttttgaagaaaagctcattgtaccggttgtataactctaaagcccgctgtgggctatcatgtttcacaatcattctcattggccatgccatgaccgagggatgcagtttgttatacgtaacgtcgagagttccattggcagcattttccatgatgtcttctaccatattaatcgtttccttgatttcctcattattttgtaggctttttttggcaacggccttcaatatataatataaaattttggaattcgctggtaccttattctgtgacattgtcttgtacaagttaattataccgtcacgataaccctctttgtcatatgcctccattattatttcaaaatgtgtagcgtccaccttgattacagaatgttttattagttgatctatgatgctcaatgccgtttcgcaatcttcgttcagtgtaactaaaaattttatcatcatcttgtaaaattcactgtttacagccagttttgaggttgtgatcttgtcgaaaagttcttcacacttgttggcatttcgtaaaccaatataagctttgatggctttgttatacactgaaattagaccatctctccaagataaattctttgaatgtttttcaaataatgctattgcctctgttggcctgttactctcaatatatacatccatcaatgcagagatactttttccagtgtgttggatattataatgttcagtcataaggttgaataattcttgagcgattaaatggttcgtagttttgcaacacatttgtatcaataaagcaaagtgcccctccgtgatttccacgctaggatcctcgcttagtctttttaatatcctaaacgcaccatcaaggtcatttaaaccacgatacactttaagcattatggtatgcgttgctgttgaaggcgttatgtcgtatttcttgaatagttcgaagtggctaaaacaggctgcgaaatctccgactttataatgtgcatatagtaaagattgtaaaacagcgtatgtcggtatcatacctctcctcaataactgtgtatatagtttattgacactatccaattcaccaattctggccatagtatacatcaaaataccataatgttgtatggaaggtagcttaccgataccgaaaagagcattgaactgttgttgtaaggcgtcccaattatgcagcctagaatgagccaccaaaagataatcaaattggttttggtcgtgctgagcatcagggtatttccaatatgttgacgaaaccaaattaaacttctgcatgtgacaatacgtctttagaatacacgtcaggtcagaactcactatcggcaggttatgttcgcacttgtaattccaaactgcttctgcagaagaaaatttcctaatataagttaataagaacaacaacgtagttgcaaattgagacgctattgcgggcccttgcgttagctgaattgctttcaaataagataaataatcggggcgaacatttgattgcctcatgaatgataaaaagtttctcaaaactatcttgttctccatataattcgtaaattcacaatgtccattcactagtttcatccatttgacccatttatatacagcttcttcatgcatattcattataaccatcctagagaaaatcgagttaatgaggtctatcaccattgtcttttgtgttaatagaaaccgttgtatgatatcagagattgcctgatctaattgaatacctctttgtaaaatcaataaagagagaaggaactttttcaattcaggtaatgaggcatcctgttttaacaatctttgtgaaccaatagtggtataaagaaacttctgtgcaatttttataacgttcccataggcctggtgccgataaagatactttataaggtactgtcgttcaaatgttgtggtagctgaattacttgttattgatgttgttgctttctttgttaatccactgccaaccgactttagaggaacacttccgcgcgccataaaatatgagaccaggtttctctcatcctgtgagcataatggtgacgtcgatttatctcgaagcagcttccttatatgatcaggtacgccggtactccatatacccttcttataattataatttcttaatacggcaggagcacaccttttcataatggccaaaaagcgtgtttcagtatactccaacacccttaatcacttaaattcgaagctttgtacactattgcggcctctttcctgggtatcgaggctgcgttagcgtcacctagaaatcccactttaacttacactacatgattttttatttttatttctctattggcccgaaaagttacttttccttcaaacaatgaaaaatttcaaaatcaaacctcatcgcgatagtattaaaagtgctttcacaagaatgatacaggaaggtggtcaagtaagcaactgagcaaaatcaatatgggtacagccaagcaaaatcaaaatagaaagaagtttacgagggagtataaggttaaggagatccaaagaagtattacaaagaaaactagactgagaaaggaataccttaaagctttaaaagatgaagggtatgccgtaccagaaaaggaaccaaaaaccgtggcaaaagaatctgtaaggaagattaaggaagccagggcaatagagggaaagaagaaactagacgagaagaaggagatcaagaaacaaagaaagagaatgcaaaaagatgaattaaacaagcaaagaaacgagcaattggaaagaatcagagtttcgaaggaaaaatttcagaggagagaagatagaaagaagaaattgactcaaagaacaaggacaggccagcccttgatgggccctaagatagaggatcttttggataaaattaagacggatgatacttatacctcctagataatgatattcttcaaaatttcttttcattcgtgtatttacagaaagatctttttatttaaatttacttaattagtgtgtatattaattttatttcctgccttttgttaattcctttttattggaatttgttatttacaagactgttttgcccatgaggacttgactatttcttcgcttgcttcttttggaactcagatatcaattctttttgaacatggggcgctgttggagcgtaatgactaaactctaatgaaaactcacctttaccttgagtcgaggctcttaatgaggtggcgaaaccgaacatcgtgctcaaggcacattctgcttttaatgtaaattcatcatgaccattttcggtatcctgtattactgcttgtaatttattcaataaaccgatgacgttaccttgaaactcgtttggcgatgttactgaaacattcatgataggttccatgatcaccggctgtgccctcaggaaggcgtcacggaaggctgacatagtagctgttttgaatgataattcattagaatccacggcatgaatagcaccatcattgattagcattttaacatccaaaacacgatgaccgatcaatggtcccttttcacatacttcttcaaaacccttaccacatgcagccaaatacttgtccggtatacggccaccaacaatagcggtctcgaatatgttgcctttggtaatgtcatccacgggagataaggtaccgataactctaccatattgaccagcgccaccagattgttttttatgtgtataatcaaaatctgccgggatggtgatagattctctataggaaacctgcggtttacccgtgacacagtccacattatattcacgtctcattctttcaacgtaaatctccagatgcaattcacccatcccagaaataattgtttctttagattcaggatcgaacttcactctgaatgtagggtcttccttttgaaatctgttcaaagccttcgaaaaattcgatgcgtcctttgaatttggcgtaatcgataacgagacaacagcatctggaacatacatggatgacatagagtattgaacgctaccatcagtgaatgtatctccagaagcacagtcaataccaaaagtagcgcaaatttcacctgagccaacttcatcaacatcttccatctcactagaatgcatcctgaccaatcttgcaaccttcacttttttaccagtctttacatttgtaatgtaattaccttttcttaaacgcccctgatatacgcgaacataagtcaattgaccatatttgccttcttccaatttgaatgccaatccaacaaatggctgttgcaccgcaggaactaagttaaccttggcttcgttgttgctcacatctagagctgtattcaacacttcagagggattaggtaagtagtctacaatagcgtccaaaacgggctgaataccagtatttgccagtgcggatcccatcaaaactggtgtaaaagacctagcaattgtagatctgcgaatagcatctttaatttgttgcgtggtaggctccttttcttccaaaaacatttctgccatttcatcatccacatcagcaagtgtttcgatcaaaagttgtcttttttcctccattaatggcttcaaattttcaggcactggccctttttctataatttcaccattatcacccttgttgtaaatagcaactctattaatcaaatcaacgacaccagataagcttgattccgatccgataggaatttgtacagcagcagcaggtatttttagtttcgaattaagttgttctattgcacggaagggatctgaacccatacgatccattttgttgatgaaagttactcttggaacattatatctacgcatttgacgatccacggtcacagtttgggattgaacacctgaaacagcacaaacaacaagaactgcaccgtctagtactctaagagcacgctccacttcgatagtgaaatcaatatgacctggagtgtcgatcaagttgaaatgatagtttttgccctctttatcccaagagcagtaagtagcggcagactgaatagtaatacccttttccctttcaagatccatagaatccatcttggctccaacattatccctaccacgaacctcatgaatggctttgattctttttgtatagtacagaacacgttcagtgaaagtagtttttccggagtcaatatgagcagatatacctatgttacgcaatttattacatcttccaatatcgtctggagtaagtttttgtttgatttcatccaccaaaactttttcttcttcatatgtagaacgagcaagtggactctcatgaaaagaccttctcgagaaacctgaaaaaacttttgaacatgtgaaaaagggtattctacctccaaccatttttcgaggcacccacatcattttctggacactcatattggtgatatattgcagtgctttctaccttcttccgtttcaatctcctttattaaatctcgttttttagatattttcatcttggaaatttcggccgcttgtgaagttccatccccacaataataatgcaaagttatcatattaatatatatatatataaaagacatataaaaaaaatcaaatgtattgtgcatcttggatgccaaaagttacattttctttccttcattccgggccctcaatgatcgtcttgatattatttaacgggtggtggcttgtttcttcgaatgcctcgacagcatccttaaagctatagcgatgtgtaatgaatggtttaagcgagagttttctgctagagactagctcgatggagtcactataatcaccttgacagtatcggaaacagccttggaatgtcagttcttttgttggaatgatcgagatgggaaattgtatttcctcttgtcccattccaacttgaacgatcgttccacctgccttacagacttcgatgcctgctcgaacgcaaggctctgcaccagaacattcaaacacaacgtcagcacctttcttgccgattgctttttttataacactatctacagtaacgccatgtgggagatcacctgagttgacgatgtgggtggcaccaaactgcctagccgtttccagcttgttttctaatagatctacaaaaacaacatctgcagcaccaaagacactggctactttcccggctagcaaacctatgggcccagctccaaagacgacgcaacgggctccaaacttgatctttgctaatttattagcatggattgccactgataatggctctattagtgctccttcctcgaatgacacatcatcaggaagtttatagacgaaatctttcatggtcttataatactttgtcaaggtcccatcaaagggaggtgtcgcagcaaattttaaattggggtccaggttgtatctgccctctttcatctccggtgaaaacctgtcaggtattccgggctcaagtgccaccctatctcctactttaagtgtcttgacgttctcacctatgagggccactattcctgatgattcatgtcccagcaccattggtgattctaccacgtaattggctattcttccatgggtatagtaatggatatctgacccgcatattcctgtcgccttgatctggatgattacttcgttaggatctgaaatctttgggatgctgacattagttagggtgattttaccaggtcgctctagaacaatagcttcttgtgtagttaagtcagtcatgctcaatggtgttctctatcctcaaggcagtatgaatatgtctttttagtgtgtatggatatatttatgtatatacttatacagttttcaattttattttgaattaattcaggagaggggttacaatctcctaagggatagtagcgccggtgacattttattcgctctaagatgaacttgagttcgagtccactttgaggatattatggatttccattaggataggctctatctcactgggatcgcaagccacgccattgcccaaacgaatggcatgtgatgcgtttgcgggtttgacagattctggggtacctaatctcttagtatccagcataaatacttgatttctcacttgatgcatcattggataggcgggagatttcgtggttatgtgtgctacgtctgcaaaatgaatgtgaaattgaattttatcacggccgttatgcaaaacagttttcaattctatacatattgtaatcttagtgcctgcctgagggttataatatactatctgatactcgtttagattatgcaacccaatgttcaccatagtggagtactgacttccactctcatggaatttgccccctctttcattgagaattacttttagagctttaaacaaggatgacgtgaattgtaggtagctaaaaataaaatgataatccattttcgaattatctaagaaaggttgaattatatgttgtgggtttgaaggtgatagttgaactgtcagatttttaatagagtcgtcattcgttgatatctttattgtgcagtctttatcatcttcgtcattattggagagatacttgaaggaaatttcattcggttgtaatgcaattatcttgaagttttcggactcaaaattcttgtgcaatctttccacgacatccgttagtacaaccaattgcatcaatttttgcctaaatttggttagatattgcactattataccaagatttgtaaaactctcctccaaataaaaggctaacggttcttcttgtacaaaatgaatgtatagtttatcaatctggcattgaatcatcattgtgtttcttttaaatttagcatacaatcgtatttgggaattggagtaatctatcctcagaaacatggaactttctaatatggagttcagcgcttttgaaccttccaaaaatgactccaattctagagttattattgatatgttatcattagtattacttccttggataatatattgaggtagtttttgctcgttgatcatttcagaagaacaaatcttattgcgaatttctagttggttcaaagaatcgatcaacatatggtttataattctgtttaaaatagttctttgcaatatcataattttttgatatgttattgactccaatttgacagtcatcacgttggaattgtctaaatatttgagattccatttcccacgttgagagacaattttaccgattcttttttccaccacacatgatgttttagaggatattatcgataaaatcaaataccagttgagcggccaatgtggtagtctgataaataggtccctttgtaataacaaggaaacatcactattagtagtgctgttaccagcaatagcatatttattatcttcttttttaacaacgctttcgccgccagtattcacttgagtcctgattggtttatcaatcttaataatcctgctgcatgaccatcccgtgttttcaaacatggtggttaaaacatgaataatcttgtccagtttcagctgctgtagtattcttgccaattcctctggaccttcagctctatttatctttgacgcgtaatttgataatagtggagtaggattcctaaaataaaactgcccgctcaataaatcaatttttaattgaataggcgccatggaaacacatgtggtagggagttgaaataatagaacatccgaattttcttcgtcttcttggaatatatcccttgccaacagctccgatctgatgattctagcatgattgaacataatttcatccaaaatcccttcgatattagatacaatattgttataaattacaggcatatttttggcccttgatgcactctggttgtcccattttaagataagactttctgttgttctttgaatgccaatagtgatcttacccttactgtccattttcccattcagccaatatctaactgtaattgtactttttttagagtcatagttatggatcaaattacttttggaaaatttaccgccgttggccagctttaaaaactctctatgaaccatgtatagctgtaatgtcaacacgtatttgtgcagaaaattgtatagggataataatggatcattacttttcaaaagaatttcattgatcaacttctctaatcttggcttattcaaaggaaggttatttccgttggaacttgagttttcttcattgttctcactatcgccgttagtcgaagtagcttctgtaactgctgaaacagtttgttcagcttccgtgttaaacaacaattttaaatccacaaaaaacagaggggactgtctattaacagtcgataactggatttcaaattcattagggacagtaaagtagattctaccgtttttgatatgatagctgtttaatggtttaggaatgttcattaatgcaatttttattgagacagtcaagttcaaatcttttaatctctgtaaaatcaatccaatgggaactttggccattccatctaccatatccatagagttactgacaccgcttaatttaaagttgtgtgtaggtagatttggcctcccaagactcaaaacttccaaagcggtgaccaaatccacgttgggcaatttagcattggtcatagagtttagactgcttttcaaagcccaaatacaattgttgacattcatgttagtcgttctaaaccagttcaacagatcgattagtacgtgaaagttgttttgttttatagtacgggtccatttcacaagcacgtaaagtttcaaaaattgtgtccttaggaatataatcagctgtaagaaacgtattttctttgcggagttaggctcatttgcctgggtgtgaacattagttttcatgtactgagcaagttccttcattgtaaataccgtcaagttccttattactaatgccagactgacttgattaatctcaacatgcggcaacgctggcggaggcgcacttgtcatagtcgctgcacttgtatctttcggtaccatttctagagattctttttgggtggccgtagtttccgggtcggttgcagaagggccatgcagttgagtgttcttaacgggaccctgttgctcttgcccattctgctcggaccggttcttcagtgcgtgcatctcgttagaaagtctctcctcattagccagcatttgtggggatcctatcgtggtagtcattgcccagccaagaaaaccctatactttcctgccactttttaactctttttctgatgatctttacaacagacctctactaaacaattgaaaaattcaccgtttttacttgaaccagcgaccgtgcgatgggacaatcgtttagttaacaataagcgggacaaagtaattaaatttagtggcatctagagagaataattgaacgcaatgaagagagcatggtacgttgaattgtagaatgtggggggatagtatgcgcgagcttggtgacgctatggataatgagttgaatgcagtgaagccggtggtggaagaaggtggcatggatggtgccagaaaatttattaagggtaagagctttcagaagtcttctaccgaacatatgttgatttcgcccggtagggatggttcagtgccattgaatgggttgaaatcgtcgccggcagacccgcacttgtctgatgttaattctatcttggacaatcatcgtggcggtggcgagacagctttgacgtctgtaaataatattatcatggccacttcgacgaatggggacagtgatggggttgatggagatgccaagaggccgtctatttctaactgttcgtcgagatcatcattttttgacaccgtactgagcacgttttccctaaaatcaaattcacaagatacggttactaatgaagtcaaaaatattgaggtccagtttgcatccgaggaggctaataaaaaattccgccaaatgttcaagccattagctcctaatacgagacttattacggactacttctgctacttccacagagaattcccctatcagggcagaatctatctctccaacacacatttatgtttcaactcaaccgtgttgaactggatggcaaagttacagattcccttgaatgaaattaaatatttagataaggtcaccacaaattcaagtgctatttcggtggaaaccgtgactaacaggtacactttttccggattcatagcgagagacgaggttttccaattgattacaagagtttggtcaaaggaaaacttaaccaatatcaatgacgttttggaggttgatgagagggtctccaagaaaaagggaatatcatcgaccccttcttccatattcaacaatgtttctaccaatgcatataacgatttcatatcgacaaccactactgaaccaacaagcagggcttcctacatgagcgagaacgacatgctcatcgaggaggccataaggtccgtggacgattacatgggcacaccaagagcatcgccatcttcttcatcttcgtcgtcatcgtcgtcatcgtctttaggctcttcaacaacttattattgtaggcccgtatataggttaaagccaaacgcaccatttcaatatgaggggccattccatgtacaagaaaccatggactttccttataaacctgaggctaataatgaatacgtgcttctggaacgtcaattcagcgttccacccggcctacttttcattatgatgttcaatgaagataatccagtttttgagttaagctttttgaaaactcaagattcgtccaacatctcacacatagggacttttgaaaaagtcaataaagatggacaacattacagagaattccaatacaccaaacagctgcatttccctgtggggcccaaatccacaaactgtgaggtagcggaaattcttttacactgcgactgggaaaggtacataaatgttttaagtataacaagaacaccaaatgttcctagtggtaccagtttcagcaccagaacgaggtacatgttccgatgggatgaccaggggcaaggttgcatattaaaaataagtttttgggtggactggaacgcatccagttggatcaagccaatggtagagagcaattgtaaaaatggacaaattagcgccactaaggacttggtaaagttagtcgaagaatttgtagagaaatacgtggaattgagcaaagaaaaagcagatacactcaagccgttgcccagtgttacatcttttggatcacctaggaaagtggcagcaccggagctgacgatggtacagccggagtcgaaaccagaagctgaggcggaaatctcagaaataggcagcgacagatggaggtttaactgggtgaacataataatcttggtgctcttggtgttaaatctgctgtatttaatgaagttgaacaagaagatggataagctgacgaacctcatgacccacaaggacgaagttgtagcgcacgcgactctattggacataccagccaaagtacaatggtcaagaccaagaaggggagacgtgttgtaacagagtaatcatgtaatattgtatgtaaggttatgtatgttcgtatggtatggaaaaaaaaaaaaaaaaaggatgctatgtggagaatgtaaggcgtggtagctccggataattcagtctgtaggcttcatcacgggcagtggcctgactctgagagcttgctccggtattaagttgtgcgtttgaaattttctggaaaaaagaaattgattggttgaagctatactcgtcgaaagatttcttcggcagtggttgttgctccacctgcacgggagttgtgtttgcgtttatgttcggcttggctatattattagcgagtgatgtttgcaatttgctgtattgagaatcaatttgggtgcgtaagctttcaataattttgcagaccgcaggcacttccaactttatgagttgcaggtattctcttttatgaatatacgatgacgacgatgacgacgacgcatccatgcgcaaaagctcagggtgtctagatagtttgttagtcaataaatccacatatctaaaataataaataaacgacagcgacaagtcgttggcctggaacgcacactgtgccttttccaatatgccgatgcatgttttcaggtaaattctcaatggtatcgccggattgaagcgataatccttagcgtcctgaaccaattgcttactagacttcatgacctaccggggccagataaagatgcggaaggaagagaaaaaatgtatagtggttggtgaaccgcaacaataattcgtgccaacactttaatcgaagcaaaaattgtcttgtatgttattaatattatctatctaaccattgatttacgtataaaactgtcgatgctcatcgcctagcaatgaaaaaattttttcttttttttttcattatttctctttgttgcgtactttttttcattgcgtttcgcggcaaaagcgattcgagttgactggaagtgtgttatactataaaaagtgtatatgcctatttttggttctgatctttactttactgttaagtactggctgaggcagtagactctgcctctgttacggcagcggtattcgcctcggcatcagcagccgcccacggtagagtaggttctgttgttttgacgtttgccaaggtactgtccaaatgctccttcagcaaggcctcattactttccttctccggacccaccgattgcgtgatctcctgtacacggttcaagaacttgttcaaattgtagcccgcagcagcatcagagacttcttgtgtgtaagggacacccctcaactccttgactcttcttttgtgcactttgccctttaaatgcgtttttaacgctatagcagtctccatgtatttggcacagtgtatgcaatagtgctgaccaaggcccggtttggtttcatccaatggctggttcagaagcttctgtactgattccttggtggacaaatcgttatagatcaggtccaagtctcgtgttcttcttttagtcttgtatctcttcaccgaatatctacccatgatgcgctattgttttatcttcacttgtctgtgtgtttaactgcctttcaattcacctcatctcatctcccgctactttccatatataaaagcaaaattaatttgctttttcccctgtcagtataaaaaaattttccgcaggatatagaaaaaaaagaaatgaaattatagtagcggttatttccgtggggtgcttttttacacctgtacatcttttccctccgtacattttttttatttttttttttggtttttttttttcgatatttttccctccgaaactagttagcacaataatgctgactaaggaaacttttcatctcagaattgatggtcagtttggtttctctagagaatagtttataaaaagatgttgatgtggagcaaccatttatacatcctttccgcaagtgcttttggagtgggactttcaaactttaaagtacagtatatcaaataactaattcaagatggctagaagaccagctagatgttacagataccaaaagaacaagccttacccaaagtctagatacaacagagctgttccagactccaagatcagaatctacgatttgggtaagaagaaggctaccgtcgatgaattcccattgtgtgtccatttggtttccaacgaattggaacaattgtcttctgaagctttggaagctgctcgtatctgtgccaacaagtacatgactactgtctccggtagagatgctttccacttaagagtcagagtccatcctttccatgtcttgagaatcaacaagatgttgtcttgtgccggtgcggatagattgcaacaaggtatgagaggtgcttggggtaagccacacggtttggccgctcgtgtcgacattggtcaaattatcttctctgtcagaaccaaggacagcaacaaggatgttgtcgttgaaggtttgagaagagccagatacaagttcccaggtcaacaaaagattattttgtctaagaagtggggtttcaccaacttggacagaccagaatacttgaagaagagagaagctggtgaagtcaaggacgacggtgctttcgttaagttcttgtccaagaagggttctttggaaaacaacatcagagaattcccagaatactttgctgctcaagcttaagttcttttcaaacatttgaactaacttaaaagagaaatttttttgatttaaattctagtttattaaacagtaaatatatttatacattattgtaatacatataattatgtgtttttttaaagttcagcatgttgggtagtgatatatcctgaagtcaatggacactgttgctttttgtataccagcaggaaaaaaaaaagcctgagctgcagtaacgaagaattgttgaatgcgtctaacaagaaagggagcaatcgataacagggacgtgcgccgctaatgtcattcagattattcacgaggacttctcaacgtctccctcgccttaactgggttagtcccatcaggcgatacgccaaacaacctcaatacgatgaagcagagttgtttgcagagaacattaaccatggcgcatataaagcaaagaaaaggccatcagacgagcatttccaatggcctgagaagtctcctgatcagatcacaaaggaatctgaactccaatgggaaaggatggcgaaattatctgctgttgggcaagggatcctcattctcgtggtagtgggtgggttgggaacggcctacttgcgttggccagaattaaaatcctggtggttaatcaagatgaatggcggtcgcataaatgcaacgcaagagcaaagtggacaggattcgttggaaaaattgatcagacaaaaggccaaaaatctattaagggagattcctcaagtgcctgcctttcaacttggaatagatcatcctggtgtatacatatggggaaggtgtcattctaaggactcattgttccctgttagagtacctaatttggatggtcgtaaattcagagatatcctattagctccctctgacgatttcaacaccaattttgcaattgacgagaaaggcgatttgatatcgtgggatgatttgggacaaacaaaaacgatattgccagatcaagatttgacctcaatgaagtattctagtcactttttgtacgctttgaataaaaagggtgaaatattggtcatacctataagaacgccggatctgatagcttcgcaagtatcatcaagaaggtcgaaattgttgccatggaagacaaaactaagatatgattggaaattacaaacaaatcagattttcaacggtaaggaaggagaaaaacgtgtagtacaatttgacgctggtagccatcatctggtgttgctatctaatttaggtaaggcttattgctgcgcgacgggaaatgatcaaaaacaagctcaagtatccaaaggacaattcggtataccaacattctcacaattcgatgagtttcctcccaataatcaactattcgaaattgaactgctgaacaaatttaagcatgaaggagaagacgttgtccgcaaaagagaaattaaaaagatagcttgcgggtcgtaccatacactggcaatagataagactggtgaaatttatgcctttggctggaataggttcggccaattggcactacctatttcgtacaatctagaatatgtttctttcccaagatcggtaacgcatgcatttaaaccgcatttcccggggatgacgaattggaaatgtgtggatattcattgtgatgatgaaacatcgtttgtgaccattcgtaagcctggctcaacgtcagaccatcattatttcgcgtttggtaatggactttttggtgaattgggcaacaacactttcaagaactcgcaatgtgatcccataaaaatcaagtcggatgacaagaaattgaccaactggagttgcggctctcattgtgtgttcactgaaactgaacaagaaaacgaggtcattgcatggggtaataacgaccatggccaactaggtattggaaagaaaactatgaaatgcgctaagccaatgaacattcccgaagttctcaaaccaggacaagacacgacagatttggactcaatttataacagtaaattacacttaaaaaaggagcaacgtgtagtcaccaatggtaataaaagttgcttatactggcgggtttgagaaacgaaagagcatagaaggaaagtagcgagattcgcgatgttttttcaacccttataatgatgcatgtatatatggtatgtttatttatatatagaactcacggttacttctatcttaaccatttcaacacataataaatacctatgatcaagagaattaacgcgatccaaaagactagtttatctttgaacacccgtttattgatagaggtgatagtttgttccgaaacacccaatgttcttaggccatttgacattctatcttgtaccttggataaaattttgttttgttccactatattttcgaatgattgttggcccatttctagaatgtaatctaattgagcgttacccctttcgaaaacagactgttccttttgtagcccttggtacaacggtagtcccccaccgttgctagagccctctttaccatttgcactcgcaccaccaacgttccttttattcatgatggtctctgatgtactaaaggggttatcggagtccataacatgcgatgctcctgagccaaacaactgagttctggaattattttcgttgtaggattgttttaaatccttaaacttggcagtaaagtcgtgcagatcctgtgttaaagttgctagtcgattagcgaacttaggatcaatttcctctgcattagtatcttctttatatctgtttaaatgttctgcatattgcttaactgttttctccagtgagaccagagttgcagagatggacccttgtaaagaaataggggcggtcacagaattcttttcaaacctggccaactcttgttgtagttgatttttttgcttcacagcatggttgtaaagagcgttctatttgatggtagtagcaaaataccctgttagtattacatcttgttttagcaataatgagaaaagatgcctccggcgatcaaacataccattcccccctcaaatcaatatgattaagtcacgataatatctgcactattgccgtgtttccttctccatcgacagcgtcgatcctgtctattatagccagcacactgaaaatttcaatggctggcttgttgttcgcgtcgcaacttttgatatttataaaaagagagaaggcatatccaaaggataaggtattgtctttgtaaatcaatcaaccaaacctctacggaattttgacccttgaagcagggactattacacgaaaatgactccttccaccccaccaaggtccagagggactaggtaccttgcgcagcctagtggcaatactagttctagtgccctaatgcaaggtcaaaagaccccccaaaagccttcacagaacctagtccctgtcactccctcaacaactaagtcttttaaaaatgcgccattattagcacctcccaattcgaacatgggtatgacctctccatttaatgggcttacgtctcctcaacgctcgccgtttccaaaatcttcagtgaagaggacactattccaatttgaaagtcatgataatggaacagtaagggaagagcaggaaccattgggtcgtgtaaataggatattgtttcccacgcagcaaaatgtggatatagatgcagcagaagaagaagaagaaggagaagttcttcttccccccagcagacctacatctgccaggcagttacatttatcacttgaaagagatgagtttgatcagacacatagaaagaagattattaaagatgtacctggtacgcccagcgacaaggtgataacatttgaattggcaaaaaattggaacaacaactctccgaaaaatgacgccaggagtcaagaaagtgaagacgaggaagacatcatcatcaatccagtgcgggtgggtaaaaatccctttgcatcagatgaactggtcactcaggaaattagaaatgaacgtaaaagggcaatgttgagagaaaacccagatatagaagacgtaataacatatgtcaataagaagggagaggtggtagagaaacgaaggttaacggatgaagaaaagagaagattcaagccaaaggcattgtttcaatctagggatcaagagcattgaagaaatgaaaaaaaaaagtttctggaacgattatattttatttacttacttattctacatttatttgcaaaggggcattaacatcaacattttacatattataatatatacaggatattctatattacaacattaacaggatttttaacttttccttaccgtattcttttattctggttttctgtcttcagaataatagcatatttcattgtagtatttcgtcaaagcgagttaggggaggatgactacaagaaagacagcttcctctcttcagcttttagggaaaatcacaggaacaaaagctggaactaagcaaaagaagatgaatttcattaatggactgatatggttatatatgtgtgtgtggatggtacacggaaaagtgacgcagaaggatgaattgaaatggaataaaggatactcgctaccaaatttgctagaagtgacagatcagcaaaaagaactttcacaatggactttgggtgacaaagtaaaacttgaagaagggaggtttgttttaactcctggaaagaacacaaagggttcactttggttgaaacctgaatattcaataaaggatgcaatgacaatagagtggacgtttagaagtttcgggttcagaggcagcacaaaggggggtcttgcattttggctgaagcaaggaaatgagggagatagtaccgagttatttggtggaagttcgaagaagtttaatggtttgatgatattgttacgattagacgataagttgggagagagcgtgacagcgtatttgaatgacggaacaaaagatcttgatattgaatcctcaccgtactttgcgtcatgtctgttccaataccaggattccatggtaccatcaacattaagattgacttacaatccactagataatcacttgttaaagttgcaaatggacaacagagtgtgtttccagacaaggaaagttaaatttatgggcagcagcccatttaggattggaacaagtgctatcaacgatgcatccaaagaatcgtttgaaatcttgaaaatgaagctttatgacggagttatagaggattcgctaattcctaacgtgaatcctatgggacaacccagagtggttactaaagtgatcaattctcaaactggtgaagagagtttcagggaaaagatgccattttctgataaggaagaaagtataacgagtaacgagcttttcgaaaagatgaacaagttggaggggaaaatcatggcaaatgatatcgatccattactccgcaagatgaacaagattgtggagaatgaacgtgaactgattcaacgtttaagaccactgttagatctgaagaaaacagccataagtgacgatagtttccaagattttctttcgatgaacgcaaacctggacagattgataaaagaacaagaaaaaattcgacaagatgccaagctgtatggcaagcagaccaaaggtcatgatgagatattttccaaaataagtgtatggttggcactgctgattttcattatgatcacattggcgtactacatgtttagaattaaccaagacatcaagaaggtcaaacttctgtaagctcttgtgtctttgttatatgggtacaagatataagaaacataactattacatacgaaaatgtgcatgttatctatatccttctttatatagatgctgttaacttctttttttttttttgggaaaatcaactgttaaacgcgacagtaaaagcagcaaaacattaattttgcttccaagacgacagtaatatgtctcctacaataccagtttcgctgcagaaggcacatctattacatttactgagcataacgggctgtactaatccaaggaggtttacggaccaggggaactttccagattcagatcacagcaatataggactagaaaatatcaggtagccgcactcaacttgtaactggcaactactttgcatcaaactccaattaaatgcggtagaatcttttcacaaaaggtactcaacgtcaattcggaaagcttccttccggaatggcttaagtaggttgcaatttctttttctattagtagctaaaaatgggtcacgtgatctatattcgaaaggggcggttgcctcaggaaggcaccggcggtctttcgtccgtgcggagatatctgcgccgttcaggggtccatgtgccttggacgatattaaggcagaaggcagtatcggggcggatcactccgaaccgagattagttaagcccttcccatctcaagatggggagcaaatggcattatactcctgctagaaagttaactgtgcacatattcttaaattatacaacattctggagagctattgttcaaaaaacaaacatttcgcaggctaaaatgtggagataggataagttttgtagacatatataaacaatcagtaattggattgaaaatttggtgttgtgaattgctcttcattatgcaccttattcaattatcatcaagaatagtaatagttaagtaaacacaagattaacataataaaaaaaataattctttcataatggcagttgaggagaacaatatgcctgttgtttcacagcaaccccaagctggtgaagacgtgatctcttcactcagtaaagattcccatttaagcgcacaatctcaaaagtattctaatgatgaattgaaagccggtgagtcagggtctgaaggctcccaaagtgttcctatagagatacccaagaagcccatgtctgaatatgttaccgtttccttgctttgtttgtgtgttgccttcggcggcttcatgtttggctgggataccggtactatttctgggtttgttgtccaaacagactttttgagaaggtttggtatgaaacataaggatggtacccactatttgtcaaacgtcagaacaggtttaatcgtcgccattttcaatattggctgtgcctttggtggtattatactttccaaaggtggagatatgtatggccgtaaaaagggtctttcgattgtcgtctcggtttatatagttggtattatcattcaaattgcctctatcaacaagtggtaccaatatttcattggtagaatcatatctggtttgggtgtcggcggcatcgccgtcttatgtcctatgttgatctctgaaattgctccaaagcacttgagaggcacactagtttcttgttatcagctgatgattactgcaggtatctttttgggctactgtactaattacggtacaaagagctattcgaactcagttcaatggagagttccattagggctatgtttcgcttggtcattatttatgattggcgctttgacgttagttcctgaatccccacgttatttatgtgaggtgaataaggtagaagacgccaagcgttccattgctaagtctaacaaggtgtcaccagaggatcctgccgtccaggcagagttagatctgatcatggccggtatagaagctgaaaaactggctggcaatgcgtcctggggggaattattttccaccaagaccaaagtatttcaacgtttgttgatgggtgtgtttgttcaaatgttccaacaattaaccggtaacaattattttttctactacggtaccgttattttcaagtcagttggcctggatgattcctttgaaacatccattgtcattggtgtagtcaactttgcctccactttctttagtttgtggactgtcgaaaacttgggacatcgtaaatgtttacttttgggcgctgccactatgatggcttgtatggtcatctacgcctctgttggtgttactagattatatcctcacggtaaaagccagccatcttctaaaggtgccggtaactgtatgattgtctttacctgtttttatattttctgttatgccacaacctgggcgccagttgcctgggtcatcacagcagaatcattcccactgagagtcaagtcgaaatgtatggcgttggcctctgcttccaattgggtatgggggttcttgattgcatttttcaccccattcatcacatctgccattaacttctactacggttatgtcttcatgggctgtttggttgccatgtttttttatgtctttttctttgttccagaaactaaaggcctatcgttagaagaaattcaagaattatgggaagaaggtgttttaccttggaaatctgaaggctggattccttcatccagaagaggtaataattacgatttagaggatttacaacatgacgacaaaccgtggtacaaggccatgctagaataatgcgtttgaagtgagacgctccatcatctctcttaatttttcatgactgacgttttttcttcattttaattatcatagtatttgtttgaaaaaaaaaaaaaaaaatttcccttatcaatgatatccttacgattatataaattccttacctaaacctattatttgtgtacatatatcagagtattattacatatataacctttttctctaaaacaggaaaaaaaaaagaaaacgataacatgctctgccatcctttgttcaccgagcaaaattaaaaacgcaaaatgaattgtccctatgaaattattaaaggaccacatcaccagacttatctctggggggtcctctagaaaataagtcaggtacttgcctggactttcttccagttgaattcctgagctaacatacaattaatggagtgagaatgttcgaacgatccaggagttgcttttttcagtcatttgtttatcagtgtaacaagcatttcctttatttcttttatatcaacctgcaacctattaatattcaattcaacgtctcggagcttttctcgtaccgttttaccatcatccatttccatgctaactaattctgagattacgattacatattgtctcagttctggttcatcaatggctgataaaactttcattacattttggaaaaaatcttcgtcatttaggtctaaagtcaggatttggttccttatagactctctacgatcttttttcaagtttttttctgaagaaatatgtccattttcattagtgacagcggtagagtcctcttccgctcgaaccaaactatcactgccggtgttttcctctcgaaagggtttgtctttaccaatggaaagacgcccgtcttctgcgctttcatataatttgacagtggctatattgaactgttcttgcaaatcgccagttttggcatcccctacccaacctttttcatgcaattcctttccttgagtgacccaagcgacgaggttatctctaatatatcttgaagttataggtactcttgatttctccttataaactctgttaaaaaactcagctatcatttgatgacataatataggtctccttttacttgctctctttgttgtgtggagcaagagggcccaatatatgactgttaacttttcacaaagacttttttctttattattggaccatcgaaacttccttagttgccttgtttccgcttcgtcattactgtttccccccaagtctgtgggggctccaacgtgcaatatgtcgttgtcaatatcactagaagtatgagtttccacattcaacttggtattagtagtgttaattcttttattaaagcaaatagtatgtgtagattgcaggaggtcgaagctcttcggattggcaaaatcaatattctgctctataattttcacaggttttgttggcagtatttgtgcaattcctgtcattgagtttctaaatacattcttttggtcatattttgaagtgctctttttgcttttatgtactttttttgaagaggacgcattcacatttgttacttccaatttctcttcctccatttttggcgtttcagagggctttccgtaataatcttcaaaggaatttaaagtaaaattcttaaagttggacatccaaaaggatcttcacaatataagcgtttttctgtccaccagcttcaacaagcttcagcctactaccaatttctaatactgttttatcttattacttgcttacttatccactcccattgttttgtcctagatgacagcatcacccggactgaatattaaagcgtcagtgtcacttattttaagtcataatcaagtccttttaatgtggctatagattaaccctgtacactaaagctgtatattatttccttaaaggagcatttattcccaaactgtaacgcagaatgtcattccagaatcatggaaaaaagattcaaataaataaatgtatatacaccaaaaattacaacttcgaatcctatagtacttttaatctttttgaaaaaaatattactaaaaactatgtatcatgtccaaaggccatagggcctagcattttctttgttaaaaaagataaacagtagagaaataaataaaaaacgccctaacccaacatataggacctctttttcgttggcctagtcaactttaatggatgagtagatttttctaacaaagagcatactgctgataaagccaattgaccccgttaccaaacagcagagtaatgaaatgactgaggagtatcccacgtataagacaatagtcgtgaatccacccaacttaaatttggtgaataaaatagaatgaataaacacatacaaagcacaaccggcgcctccaattatgaatcctctccattgccacttccagttctccaggcataaggaatgataagtgatcaaaatagtgacgagtgaacttgtcaaagttaataggaggaaagagaaaaagaggaaaccaaacatgtaaaaaatcttattaaaccataaacttgtgtatatgaaatacaactcaacggcgatggagccaaatggaaagataccagcaatcaaagtagctggtatagtctttaaataccaaggctggaagggtatttgtcttgcgatttggtttgtcttggttggatgttcatcccagtgacatcttttcctggcaatcaatgaaccagcaaatgataatgggattgagaacaaaaaccatagaaaaaccataaaaaacagagtacttgctggtatgacaccagaagaatgaacaaacattaagaaaaagttcaacgcaataattattagcagaatagcaccaggaactagaagtggagtcaatatcaagtttgccttccagtatggcccattgaaaaatttgtagatgcccatagatgtataagagccgacaaacccgaataatgcatataagataaacataacagtggctaaggaacctctagaactaggtgataggaaacccaatgcagcgaagaagatactgcaagttaccatcaaaaataattgaactcctgaaccaaccaaaattgaaagggttagcgattgacttggcgaacgaaaaacatcaccatgattcaatttccaacccgaatcttcttgaaaatcatcgtccaaatttaactcgttgtaacgtgcgaaatcacttttcagtgcgcgcaatagcgaatggataacaacagatgacaataagacaacaactaaggagaaatttatcaaagaaaaccattgaatagaaggatcatatacgtgtaaatatttgtcccacctggtggcccaagaagtcgctgattcattgaatttaacggaataagtaaaataaacttcattatcatttccttcgtctagcatcaatgggctgccagtcgtttcacatgtacctggactggaacgttttatggaaaccggttcgacgataacaccaactacacgatagttaccttcaccacgatcgtgatattcaatcataatatcgaaatggttggcaaagtaaggcaattcgtaagttttcaccatgttacgatcattacgtgtttccaattccacatccttatcggtggtttctgccccttttggagtagcctcaatgtcggttccttgagttacctgtacaaaaccaaggttgaagccagcaccataaaaactagtcttagttctgccatcataaacctctcttgcagccggtaatccatcaataagccagttttggaagaagccattttttatcaatttattgatgaatttagcatcatctcccggaattacggtcttacacagggattcacactctttttcttgtaacatattcaattggaatggtgaattataaattcgatcaccaaatataacggatcccaaggattcaggttgcttttcgactttttcaggctgacaaaaatggaatctattgtaatagtagtcgtatgagtacaagaaattttctttatcgccagaaacgttattaccgtcctcatctttgtgttgataattcattgatggagttaaatgattaacgagcaatgggatgttgtcattttccctgtaagtggtaggcgctacacctggtaaatagaaggctttgactgttgacacaaaaaaatacaacaacaaaagctgtacgtgtgccattttgtaaatcattctgttttgttttcctttcggtacttgctctctgctactaaattaatatctgaaaatataacggtagcagatgaaggaaaagctggacaaggagccaaaaattaacttaactaacgtaccaaaaaaagatacaaataaaaacaacaaagcagttcaaaaaccttgaattacctttttgtttatcattaggcctatttcttcgaaccgatgacatttttcatggcttcaccaagtaaagaaaaattgccgtgaaaaaaatttaaagggctgtaacccggacttttgtattataagttaaaatcactcattctcaggcagtattggtaacattccaagtgacttccaatacgtgttgaatttactactaacattccagtgcaagtagtaatttttattaagttttgatcaacttaggattttcctattttatttttgtttattatattaagtgttcattattttaagtagttatatattatataatacaaccccgattagacaaacttcataagtttttcgggtgggacggtatcaagcatttcattctcatcaattcgcggtttaatgggcttataatcaccctctggatccttaaacacgtaggcaagaatgacgcctgcaataccaaggacagaaactgtccctaatgctagtgcaagaccaattaaaacgacaaaaccacgacctattttcttcttcttcgattttgatttagattcactgcttgccgatgaagatggaggctgggatgatgttgactgaggacttgtcacagtaatgttcacattggcaagtggtgactgagagttgaattcagttgaaacgtctctattaataaaaattattggattgtaattggaagtatttgttgtttctgaaataaaatatggggtccatttttggaaatcaaacaacaaactttgtaggtatccgtattgcgaaatattaaaattaccattaagtaagaggatactgccattattaacattgttgattcctctcttgttcaaagtgttggattcaatatctgtgtatatagctgaaacagagctaatagagctagcattgccaggtaacgaggtaatattccattcttggtttctatagataaataatgaagtatcattccatgccactatggagtcttcagtgacagtaaacgaattcagtttcccttcagaaccactcaataatggaatcatagtagaattggttaagttaaaggatcctaaacgtatagattggtattcttttgtttcaaaaaggcctgagataattaattctgatgagttggtgaaggaaagttgtgtgatttcaccaaaaatcgtgttattgaggaaggtagaccaagttttgctttcataattgtatagacataatccggtgcaattcggctcagtcatttggaaatctccgccgacaagcatactacagtttttttcaaagttaactaaagcatttattctagcatttgatcctagtgtttcattagcaatcatggtcaaatttctcaaatcaaaaatcgacagttctgctgtggttgaagatcctgcactgacagctagtaaagtttgattatcagcgtatagcatttgagtaataccgctagaccaattccaggaaggataaacttcattagaaaaataaattttgtttagagaatccacctcatatgcatatgccgtggcagactcatttaaataagctcccaggtaaggtacaatacccccttctaggttaagtggctctatttcattttcgttcaaaaaacgtacagacccattcaaattaccatattgcatatgagatactgcacctgaaaacaaaacatcgccatcgccattgttaccagccgcccaaagtgatagactaaaggaactggagttccgtataagcgcattggaagatgcattgaccacataatcgttatcaagaacaataaagtcgttatttgcaagacttatattaagggcactattcactgtcctcgattggttgaagacattctcaaatgatccattaaacaaaaaaacagctgattgattatttgatgaaagaatatctccaaatattagtaaaccttggttagttttcgttataccatgtacatcaccttgaatggtttggtttttacttgatgtaacctcaaagtcgtcattaaggtcgacaatggaaatacggttgcttactccaccaattactaatttgttatcgtaaatgtcagcataaagggaagaatttttagggtaattttttactgggaaaagattcaaagtagtattacctacctttgtttcgttcaatctcgtgctggtaaagtttgatttctggtattggagaataccattcaataaagtttcttttttagcgttgctagaatctgaaagtgtgttaaaagcatctaaagaaacagtaatgacattaacttgatctgccacgaccactgttgcagtgttggttgtataaattcctgagacatactccaaaacgatctccggtgagaaatctagatatcccgagtagatttgatcatattttagattatcattattctggtaaatcaagtacgtcttcattattgtgttattttgttgattccacatggtcacgtttacaatacctcttgcggagcacgtattatcctgaagacaccctggtgtatacatgttgatagtgtagtgaccggggtggataatgtttgggtaaaactttacgcgtggaattggctcattttgatctggaacatatttcgcggctatataactttcacctgttagaccattataccaatcattgctcgacaatgtagatgacgacgaatcattggtaagcgcgctgcagccatattcgttgagagaatcattagcataagtggagaatgtgtcctgatagagctccaaaccggataatccaacactaccaccgtatgaatttaatgctacaaattttaacgatgaaacgggaagttcattcacaaacgcaaagtcttggaaatctgacgtccattttacgtctgtcttgttgttatcgatgaaggtaatcatgtccatggatgaagatacattttggcttgctgataataaagtggctcggctatacaaagggcaaaattcaccgcaattcttcaactccccacttagtgggtccagatacgttaaattcattatgctactggatggatcagtcagaatttggaacacggagatttcactatcggaacgttgggaattataaagccttatttttgttggtgaaacttcatatggtaaattacaaactagagacccagacgtatccggataaagccatgcatcctcattagtgttaggacaaactaacgaatcagatgcaaacgttgtacttccctgggaatcccaggaagcgtacctcagtggaattcgttggcctagctccaatgtagtagcgtttaaagaggaagttgagttcgtaccgttatttgaactactgataagcgcagaaggatcatccagtgtataaaactggcctgcaaataaaatgttgtcattatttagcttgactatggaattcacactggagttttcaccaaaccctccaaaaggtaaaagttgggtggtatttgatatggagtcccaaatgagagcactatagcccgtcatggagccattattatatgaaaagtttcctccaaaatagatagaagaattgtctgcgagcacagcctgaacagctcccaaagactggttgaatataggcgtcatagacagtgtcgacaaattgtataatatctggtttccgacagagatattgtttatcgtgcctgatccgctaagaataaacgaatcaacgccaaatggtgtaattttgtctattcgagtatcatcagaggcatcttccaactggatataggtgttgttagagtaataaactaatccatgtgagcttgtttctggacctatttctttagtgaaattttgttggcctgtgtactcgtaaaaagataaggcgtccacacccccgaggatttgtactgcgttgctattattttgcgatatattcaaattcggtagcacattatcttcgatgtccagaagagatttaatattctccaactgtgatgccttcgatatctccacaagaaaaggaaatgcgagtgtccagagacgatgaacaaacatttaatttctatatcgtaacgaagaacaggtgtattttgatcgttttctcttgcgtttcttcgtttcccggtcaatcaactgtataaatataaaacgaaaattgtattatcttctcctacaaagtctagtatggggatgattaaagcgcacactttccttcgagacttctgatgatgacatttccacatttccatatatttctttttttgtatcgcgaaaaaatgggaagaatggcgtttctaaccactaaaaaagaggaatttttgcctaatttgggaatttgtcaataaaaatgtaaaacatatgagatgtattattgcctgcggaagattcttaaaaacatgacaaaatccaaattgaaaatgacctgaaggtctcgacttttcggattttcattgttgctatgtaaatctatagttaattatatccaattctggtaaccaaacctgtgcttcgtacaccaatcgggaccatgctcatagtattcttctcttgtgaccctcgcttttcggtaggaatctgtctttgcaaactgtgacatcacttcccacccaaacagagcacagtcaccttcgggcaccgaaacatgacaagtccaatctgtgggtaattgcctttgtagttctgccgcaagccgttgggcgaaattgggcagattaaagtttcctcctgtacatacaatgtttcctaccataagaggtcgcactatttcgggcaacatggaaaggctctctaggatggcctccacaatgcctggtttagtaatttgcgaaatttctggatggaaaaaagtttctggtattgtgaaaagctcatctgtcagtgttatgatctgcgcatcttcaggtaacggtacattttcttttctggggtttcttacgtaaccaagaaagcttgtttggaagtcaggaagtacatattctagtgcatgcttatccttcgttttgaaactatcaaaataagacaccgggctaacgaacaagcattgttccttgatattgttaacaagtatggtttcatccatcatattgtagtgtctgaatgatagagtttcctttagtagcccagttaggaaacggcctccaatgtccaatttttttaccgctttatagtacggtattcccttcaggacaggaattatccaagtacaattaaacccggaatcaataactaattggaaatcatgataatcgctacctgaatcctgcgcattcttggactcgcttgatgtggaatttgtactgtctgagttgccacggacaatatcgatatcttcgtccttacctgaaattgttctcatttcacccttatatgacttggtaaatggtacaaagactgctacaggagacttgaaaagactgtcgaattcatattcttcaaatatcacctggtcggcatgcttacttaattctggtaaagtcatacagctctcgctagcaaccaaatgatgaccctttccctctttcagatcaaacccatcaaactctgaaggattgaaaaggcaataatcccatatacaactctctaattcccataatgtgagctgtcctagttcatgtggcctcctgaaggtgatagatgaaatatctttgatgtttttgatatgatttgataaatacgatgtcccaaatttatctttggccaatgcatttaaagctcggaacggtttcttattcgtggaaggaccaaacttgatttcgtatgagccattatcaatcacaatgggtggtgtttccatagtttaaattatcttgtccacgattctgcgcttcttctcctttggtcttgcattaattctcttgttcttcttggcccattttgaaatgcatttgtaattatggacggaaagtaaactgtttacaataatcacgaaaatacatataggtttacattatctacacactggaatcgatttcataccataaaagaggccctataagaagccgcatcaccttaaacactaaccacgtgcaaccaacagaatatatttgatgtctgatagtccattgagcaaaagacaaaagcggaagtccgcccaagaaccagaattatctcttgatcaaggtgatgccgaagaagattcgcaggtagaaaaccgagttaacctaagcgagaatacaccagagccggatcttcctgcgttggaagcatcttattccaaatcttatactcccagaaagcttgttttaagttctggggaaaatcggtatgccttttctcaacctacaaactcaacaaccacgtcattacatgtaccgaacttgcaaccaccaaaaacctcttctaggggtcgcgaccataagtcctactctcaatcaccaccaaggtctccaggaagatcgccaactagaagattagaattgctccagctttcgccagtgaaaaatagcagggttgaactacaaaaaatttatgataggcaccagtcgtcgagcaagcaacagagcagactatttattaacgaactagtcttagagaacttcaagtcctacgctggtaaacaagtagtaggaccctttcatactagcttctcggccgtggtaggccccaatggttcaggtaaatcaaatgtcatcgattccatgttatttgtatttggatttagagcgaacaagatgagacaggacagattgtcggatttaattcataaatcagaagctttcccaagtttgcaatcatgttccgtagctgtacattttcagtacgttattgatgaatcttcgggtacttcccgaatcgatgaagaaaaacctggattgatcattacaaggaaagcctttaaaaacaactcatcgaaatattacataaacgaaaaagaaagtagctacacagaggtgacaaagcttttaaagaatgagggtattgatttagaccataaacgatttttaattctacaaggtgaagtagagaatattgctcaaatgaagcctaaagcagaaaaagagagtgacgacggactactggaatatctggaggacataattggaactgcaaactataagccgttaattgaagagcgaatgggacagattgagaatctaaatgaagtttgcctggaaaaggaaaatagatttgaaattgttgatagagaaaaaaactctttagagtcagggaaagaaacggcgttagagtttttagagaaggaaaagcagctgacgcttttaagatcaaaattatttcaatttaaattgttgcaaagcaactctaaacttgccagcaccttggaaaagatctcctcttcgaataaagacctcgaagatgagaagatgaaatttcaagaatctttgaaaaaagtggatgagattaaagcacaacgtaaggaaataaaagatcgaatatcatcttgtagctcgaaagaaaagaccctggttttagaaagaagagaattagaaggcaccagggtgtctctagaagagagaacaaaaaatttggtaagtaaaatggaaaaagcagaaaagactttgaaatccaccaaacattcaatatcggaggccgagaatatgcttgaagagcttcgtggacaacaaaccgaacacgagacggagatcaaagacttgactcaattgctggaaaaggaacgaagtatacttgatgatattaaactatctttgaaagataaaacgaagaatatatctgcagagattattcggcatgaaaaggaactggagccttgggacctccaacttcaggaaaaagaatcacagatacaattggctgaatccgaactatctttgttggaggaaactcaagctaaactgaaaaaaaacgttgaaactttagaagaaaaaattcttgccaagaaaacacacaagcaggagctacaagatcttatcctcgatctgaaaaagaagctgaactcacttaaagatgaaaggtcgcaaggtgaaaagaattttacttctgctcatctaaagttaaaagaaatgcaaaaggttttgaacgcgcatcgccagcgtgcaatggaagctagatcctctttatcaaaagctcagaataaaagtaaggttttaacagctttatcgagactgcaaaagtcaggacgtataaatggtttccatggacgtttgggcgatttgggcgttatcgacgatagttttgacgttgctatttctactgcttgtccgagactagatgatgtcgtggttgatactgtagaatgtgcgcaacactgcatcgactacttaagaaaaaacaaacttggttatgcaaggtttattctcttggataggttacgccaattcaatttacaacctatcagtacaccagaaaatgtaccgagactatttgatttagttaaacctaaaaacccaaaattctcaaatgcattttacagtgttcttagagacactttggttgctcagaatttaaaacaagccaataatgtagcatatgggaagaaaagatttagagttgtcactgtggatgggaaattaattgatatttctggtacaatgagtggtggtggcaaccatgtagcaaaaggtctaatgaaattaggtacgaatcagtcagacaaggttgatgattacacccccgaggaagtagataaaattgagcgtgagctatctgaaagagaaaataacttccgcgtggcaagcgatacggtccacgagatggaggaagaactgaaaaaattgagggaccacgaaccagacttggaatcacaaatatcaaaggcagaaatggaagctgattccttggcgagtgaattgacactggcagaacaacaagtgaaagaggcagaaatggcgtacgtcaaggcagttagtgacaaagcgcaactaaacgtggtgatgaagaatttggaacgcttgagaggcgaatacaatgatttgcaatccgaaacaaaaactaaaaaggaaaagatcaaaggcttgcaagacgaaatcatgaaaattggtggtatcaaattgcaaatgcaaaattcaaaagttgaatcagtttgtcagaaattggatattctagtggccaaacttaaaaaagtcaaatctgcctcaaagaagtcaggaggagatgtcgtaaagtttcaaaaactgctccaaaactctgaaagagacgtagaactatcatcagatgagttaaaagtcatcgaagaacaactaaaacatacaaaactggctttggcagaaaatgacacaaatatgaatgagacgctcaacttgaaagttgaattaaaagaacagagcgaacaactgaaggaacaaatggaggacatggaggaaagcatcaatgaatttaaatctatagaaatcgaaatgaagaacaagctggaaaaattgaactcactgttgacgtacatcaaaagtgagataacgcagcaagaaaaaggattaaacgaactatcaattagggatgtaacccacaccctgggaatgttagacgataataaaatggactcagtgaaagaggatgttaaaaacaatcaagaacttgatcaggaataccggtcctgtgaaactcaagatgagagtgaaataaaagacgctgagacttcttgtgacaattatcatcctatgaacattgatgagacttcagatgaggtatccagagggataccaagactttctgaggacgaattaagggagttggacgtagaactgattgaaagtaaaataaatgaattgtcatattatgtcgaagagactaacgtggatattggagttttggaagagtacgctaggcgcttagcagagttcaaaagaaggaagctggatttaaataatgctgttcaaaaaagagatgaagttaaggaacaattaggaatacttaaaaagaaaagatttgatgaatttatggctggctttaatatcatatcaatgaccctaaaagaaatgtaccaaatgattactatgggtggaaatgctgaattagaacttgtggatagtctagatcctttttctgaaggagttacgtttagtgttatgcctcctaaaaagagttggagaaatataacaaacctttcaggtggtgagaaaacactaagctccttggctttggtttttgctttacataagtataaaccaacccccctttatgtcatggatgaaatagatgccgctctggatttcagaaatgtctcaatcgtagctaactatatcaaagaaagaaccaagaatgcacagtttattgttatttcgctgagaaataacatgttcgaattagcacaacagttagttggtgtttataaaagagataatagaaccaaaagtaccacgattaaaaacatagatatcttaaacagaacttagctagtacaataatcaattcaagagcacttgctgattgtaatatcatgctatcaaagaagtttaaagatactacccaaattcccgcctgtttatttcttcttttgggcagcagttaggaaataaaaaaaaaaaaggtcaatgataatgcaccaaaaacagaaagtacatgtatatcttaacaaactctcaaaatacaatttaaacaaagttttttgaagcaaaattcgaatgcaagattcataaatatggggcgtaggaaatctatactatatgcaaatatcacgtagttaaaaaactataaaacataaaccagaaatatggtatcaaggacttttgaatataattaggaacgagattaatgcgtatcatctagtatcttgacatactgcttttctgcaagataaacaagcttttggacggggataactgcggtttggtgagtgaatttcggaaatttttttctattgacaccaaaccattccataggtggagtggcgtctcccagatctcttatctgaggcacttcgatctgcggttcttctagtgcaatataattaaactttgaagcggcttcttcctttttaattgattcttcaagttcttcctcagtttgtccaaaggaaatatttgctacctgggatcgacgaactgccagtgctttgacatgtgtagtccacatttcctttatgaagtctacaggccctagattccaccttacagatattttgtctgaaaaagagcaagcaaatagatattctaaattatttgtcttttcttcttgtaaagttgtcatatgaacagcaagttttggaatatcaatgatagtaccaccgacaatcttggaagcataatgcatgtaatcatcaatagcaatggaagctccaacttcctcatctaattcttctttggaagtagaaagcgctgcagaaacatctaaaacttgtagttgcaaatctgtctttaattttttccccgaatgtgtttcggaacgtatagagactttgtcaattcttattactaacacttccacatcgaataaagatattggcgaaatctggacctttgaagaggagatattcaccgagagatcagttctgagtaatttcagcgatcttaaaatgtctttgtataatattggttgcctagattcaccaggattggaatctctcaacgtctccatatacgatattttattatcctgcctcatacgtacaatggtgttgtagatatccagtatatttgctacaactaatgcagtagagctgaggataatttcatctgatgaaaaagagacctgcagcaaatcaggtagaacccccttggcatccttttcattatgaagatggaagtgtatgttacttatagtgccgattaagaacatatgataatcaaaagcagcctttaccgctatatcatcaatattcagggaggtggaaactaatggatgagtatttttgcttttttcaggtggccattttacttctgataaccaacttgcattcgcaacttcaaataaaccactcagtctaccttctgatgtcaagctaataccgtcagtgaaagcatgcagtaactgccgcttctcgttataatgatctgtggccagccatgttctttgtgtccttaatgaaatcataccgagagaaggacccaaatcaacgtctccgctaacatttgtaaaaattaatgtaaagcaccagggtatttccgtacctgcatcggcatagttggttgatgttaatgaactcatttcaatttccttattaacagttctttgcactggccgtgtgtgtaaaatgctactgaacctccatatgtccaagaataaatacaggttctggagctgctttacattgaagaagacgcttagatcagaaaccaaccccgttccatacatactgattacatcaggatgtgtaaataaaagcgtcaagtccatgaaaccaacttcaaaggacgtacttacttctcttgaaaatatgtgcttaatggacgcttttgtgtgttctagagttaaagaaaactccaaaggctgttcagagtcgaactcattggtagccatactgaacaaaaacgattcaaatccaacatctgcctgaaccttagcttttggttcacagctcaaacttagctgttgcttggctgatgttagttttacagccacatcaaattgatccaaaagtcgcttataatcaacattctgtgaagaaggttttgtaaagtttggtttttcgtcggtgctatgtttctttatcatcttttgcagactttcagaaaattccattaataaaggagcacatcccgcatacaaagtattatgcgttgggtcgacagtgattaatgttctgaatttatgtggcttaactttatcttcatcatgtttatatgtacagtttatagtgactactggactttttatttcaaaagatggctcactcttggtttcaatatcttcgtacgtgtaaaccctaaatacaccaccgtcatacttgaaatttgagttaacagatctaatgttatcgagaaagggagccaaactactcgaagcactttcgacactggtactagcataagaattatcattttccgcacgcaaactctcggacacatccagaatgttctttttcagctcttgaaatgctcgcatggattgtaaagtagactcaatgacatccatgaatgacgggacaaagtttacatccagtgcttcaccatgaaatctaaaaaaccaatctttcaactcaccacatcttttgaaccagtaggatatttgcatgtttggcaagaaacttctattatatttgtctttctcgtttccttcagagaaaaaagtgcttgaggtattaccattcgcaacagagaaaaaagcgtccacaactgtgaatttcccaaaatccttttcatatgctgaaaacaatctgttataacctaacattaacccaggattggagcctgctccatactggaatatccacccaatacaaaatttataggacaggatgtgtattgaacggaaatttatgggcatttcttttgacttatcacttttaccggtgaacatcttagtgttccaaatattaggggcatggcgtcttgaatagtaatggctcaagtctagcaatttatgcgcgccccacattaatcttaatagagaatcaggagataagcagaccctgaaatgagaactttccacttggaatgactgctccgtatcaaccgttctttgtagggttgatacttttatggaaaagtcgagtaatttggaaagaccaatgggtagtgaccgctcctttattagaaataggatgttttcgatggaaaactgtcccgtcaccttggtttcttctggtaacataccgttattcgtattggtcagagaaagtagcagcatatgtaattcaaacacgaaatacgtggaagccactggcacaagaacaccaaaataagtaatgctagtatctaatgtccaatttatcattatcgagggtgcctgcttctctttttttggtagatttgaactaaagaataaaggcttcagggaatataacagattgataccctgagaagcaagcttttcatcttgtaaaaaactgtttacaatacggcgcggctccgaaaaggttaacttaatcatagatattgagatgtcaacgtttatcaacgaatagccttctctagaaattcctcctttaatttcaatatcgccaaatgaaaaccttaggtattgctcctttgtctggtgcgatgtcatgaaaaaatcagtatcccatatgcttaacaaaatctcatttgaaccgaatttgttaaaatatatatcaagctgcttggcttcgtgacgaatataaaatggcgagagcggcataacttcagaactaacgtttgaaaaataacatgacaagactgtattaattttctggtcgacaaattgggactttttctttgatttaggtttaaactttatgcgctctttaatcatcatcagactttccctaatttcagtaatagcggttactaattgctcagttgaactcattgctctaaaatgaagatctgcgcactggttgtttatcagaatcgtaggcttgtgtgaccatgcctcagtagtcgctaaaactgaaaagtcgcgcagttgagcttctcccaaaatgacagatgtgtgttttaaccacacttccgatttctgggaaaatataaccaatgaacccgcttgactagttgaatcttttagattttcccatagtaaactaactctacccccaactgttctactcatcagcttcgtttggtccatgaccagttgcagttcacttttatccactaataaaacggtgttcattttgaattgctttgataactccttttttggatcacttttgtcatcttcgcccactgctgcaatgagtggaataagatcttgcaatttaagtaacctatcactgaattttccttttactgagcctactcttcccgtaatttcaatagtttcttctcgatttgaaggtaagcttgtcaccggaggcgtcaaatccactaccagattggcatccgcaacaacaaaattatgctcaacctcatatccctcaccataaacagtaaggtaaaatgatcccatggtacacttcaacaattttttaatcaaattttgtttatgtttctcattttctgccgtgaataatttgccgtatatatacgaccttgcaacatctgagaactcccaatttctccaagtcgaaaacacagacatgaagatattttttgcatctttagcagaggtatatttcttttcttttagcacttcgtcgatgttgctttgccaatcatcaggaaggtacgttaaaatgtgtctcagacgcgtaataattttccaactacgattctcacgcacatgccctttggaaagtctcataataaaagcaggttttgttatgacgtaaggatcatgactaatttgataatattcgcttgcggctgtgagctttgaaatgagttctgtctttgaattacttctggtgttctgaatagaattaaaagaagtgcaaacctcttgaataagatttccctggtcactacagtactcaaacagccattccatttgagattcgtctatggtaatatctgatgacgttaagtttaatgagttaacttgtctatcttctgtagaagaccatacttcgaaaccctcaatccctagcgacagtgcagggggacgatcttcagacaagtctggatttttcttctggttaacagtcactctgacagtttttacctttgctaaagctgctacttctaataatttatttgttcggttcttctctagagacttttcactcatttgataatcaatacgatctaaatagagctcaaaaccttcctcacctgtctcttgccagattaaatttagataagcaatatggatatcaatgtttgaaatagaagtgatcccttcttgaaggttgcttaatcgtttcacaatcccaatttcaatatcgtctaagacttgtaccatgttttcagagtaaagctgttctaataaactcttagcgaaaataaaaagcaacgggtcgacatccaacagaatatatgaaacatcaacaacatagttatccctttcgtggtttctgtcttctgtaaaagcgacaggtttgaagcttgaagggtccgcttcttcgtcattatcatcttcactgaagctggctcttgaaggctccatagttgatggagtttctgcgaatatgttcttgaatggatttgtggtctccagaagggtagcatactcgcccacaatatcttcaatgatataatctatagtatcaggcaaagtgggaagaggtaaagttgggatagacgaagatggtgctatagccccgtacaggttttggtatgtatccgaatcctgatagaacagcggaagaagaaaaggacacctatgatagggtgaatcgtgtattgttatatatctgcgttgttctgatctttttttatcgatatccttgtattgctcaaagtttgtaaatcttaattttgtttcgaatttgagaaatgatgtgtctacgccatcgcccatcacgcaatttaacgaaattgtcaattttggaattttcacgtctattctttgtgaatatttttcgttttcaaagtcgatcaaagtaaacaatatcgattcagcactaataactgattgagatttcatcaccggatctttaaggcctattcttattttttcaacgtgcacggttagcgaggtcatatcattaatggtctcagtgtcatataataatatattttccaagtcattgtagccaaaacctatcttataaaaggaattaaagaatccctttataaattcaatatctgaatcaatgcataaatctccgagattgatatcccattgacaaaagtaggtaggttctgtgggtggtaatccatacattctatgtccatgaatggtgaggtccgaaagcaatccgtgctcttgctcatcagctccgttattacgacgtataaaatcaaatacttcatttatttgttttgaaacgtgccgctttattgaagtcccgttgagaaccgccattatgtccatataataattacaacttctgaaatccactacaagttcggcaaaatgtagtgcaatgcatggatcaaaactgtaaatcgtttctggtaatatcagagcaccatcccaaaccgaaaatgtgaaccaaatatcagtttcgttggtagtccttttcaaatctgaccttttcataggacctttatcctcagattcgttctttagactgctattttggtaccctgaatctacagtagatgccaaatctgccaccgagcttttcgtagtgacatctccgacttccctagcgccaaggacacctgtgtactcttctgacgtcacaaaattaaaaaattcaccgaagtaattcatctttacgtttgttaaatacctcatgacaaacccatagcagtgaagtactgtactcttgctgttacactctatgactagcgtatcgacattatcaatatctaactcggaatagagaaggtaagaacctttaattgtaaagtcgtatgctctccccacttctttatgtttcatgaattcgttcaatgtattccaagggggggtatttaacatcattctgaacattggagttgagatctcgtaggacatatctgtgtatgtccccaaaatactctcacggggtaccgtgacatcaattgaaagcttatcaccatgaagggataaataacagttttcgttaaaatctaacggattgttaacaatattgtgatcattgacgtttaagtaaatggaatatccttccatttcccaattgactttgtatacgaatggtctaaaaagttcgtaaggcgtaggatcaccagcggaaaagtctgaaagcgtatctgcaactaaagttatatgctcacgtagcagaaacgcctctaattgttctgacttcatgttaattatccatatagctttgctattccaacccaatggatatccaatatccccatcaatatcgaataccttgctttttaacaaaatatcgtgattaacacttgacctaatttcggtttccaggaaatgaacatggaaattattctgaaaaccttgcactgtaggacaaacacttatattgaaatttgcataggtgtccttacaaaatcggagatccatccatccaaatggcctatattcttcattagtttctttgtagtgtttcaaaaattcggggtctttgctactttccctcgtcggtatacgccaagtagtatcttccattattgatatattcatcctgaaaagtgtatatattcttctagaacctggcgggagtttttttataggtttggctgtccttgaaactaccggtgatagaactctttgtagatgactgacttgtctttgagcccaaggtccgtaacagatggatcctccgtgaatttgaacatctaaagcaaaatctggaggtgctccgttattgcccacatctggtccatcaatatcaggtattgtcggatgtgcaccatgtggcacaacgcccggaacatccacgtcatatgcaattgtgacctttgggcattttaaaattgatgtaaatttagcatattcatggttcgtcaaatcgaactcaacatcatctaaatcacttgctttagcgtcgcccgcagaagccttataaagagataaacctttccatttatgatagaaattgtcatctgatgtgcctgcgctttttttagtctttttcggtacaacaggcttggttactatctgaaagactcgtacaaacgttttccataactttgacactttccctctatctattttaaacttcaatccaatagcatcatcgtaaccaatattttgtttgatagaaatttcgaagtttttgaattccatctgtgttttatttctgtataaatctaatcgctcttttggaggtaaaacatctattatgccttttccactttcataacttagaatcataacagatggcgtgaatttgtttcctaacagtagggaaccgcggctaaatttaagctcaattggtaaaaacatcagtagctttggatgtttgccgatatctgtttcttggtagtccctgtcattaacaattgatgcatcagagttcgttgtgtatgcagattcgcttagatcttcatctaatttatcagcactacttccatcgctaaaaggttcaggaaaagaatgctcattaaggtatttttcaaatttatcgcgttcatcttttgatagtaagtttataacattatcgtacgccactgttctgttgtaaataaaaatttctagaccttcacattctacggaaattttacagggaagctttgcttttttgccagaagaagacttgttattctctatcaattctgcttttctgcaatttaaaagccagtatttccatgttaaactaccctctaataccgaaattgtataatctttgtgtattacggaaaggtttttaaaatgtattcgaccacctagtaaggagacacgaagtgtctcaacatttatcttgattttcgctcgtttccatagtagccattctaatataaaacttacaaggtatgcatagattcttcccatgtagaatatcattgtcaaacatactactaccgtgagaatccaatctactaaaaagacccagctaaagtccttttggtgtgtcaatggaacaccacgtaattgtgaaatagcttccatgcttgctaacttattaccgtcaatagaagacttgagtcaggtggctttaatgagtactattctttttttttttccaaagagcactatgttgataataccgcagtaattttttttgagtatcctgtagcctagaaaggttgaagcttataaaaccgtgccaacagctttatagtggggagtttggcttccctctatttgtatattgatcgccatccctacgaagttattgggaacgcatcgtgaacctctcactttaatgccagcggtagaaaaaaaagtcataaacaatacacgccggctacacttagaaagaaatgacatttgctgtcttataaaaggacttgacagaccaaagacgcgtataatacaccaagaatggccttattggagaagttgcatcgaaggattgttgatatggggcttgtcccgcgtataatcgccttattaccagttatttccatgctatgcgctctatttgggtttatttctatagctattctgcctatggatggacagtacagaagaacatacatttctgagaatgcattgatgccttcacaagcgtatagttactttagagaatctgaatggaacattttgaggggctatcgatctcaaattaaagaaatggtaaacatgacttctatggaaagaaacaatttgatgggttcttggttacaagaatttggtactaagactgctatttacgaaaatgaacaatatggagaaacattgtacggtgtaatgcacgctcctaggggtgatggaacagaagcgatggtgcttgccgttccatggtttaattcagatgatgaattcaatattggcggcgcagctttgggtgtatctttagcaagatttttctcacgttggccagtatggtccaagaatataattgttgtcttcagcgaaaatcctcgtgcagcattaagatcatgggttgaggcataccatacttccttagatttgactggtggttccattgaagctgctgttgtgttggattattcgagtacggaagatttcttcgagtatgtagaaatctcatacgacggtctgaatggtgagctgcccaatttggatcttgtcaacatcgctatatccattacggaacatgaaggtatgaaagtttctttgcacggtctacccagtgatcagttaactaataataatttctggtcaagattaaaaatattatgcctgggaataagggattgggcgttgtccggtgttaaaaagccccatggtaacgaggcatttagcggctggaggattcaatctgtaacattgaaagcacatggaaacagtggtcatgatattactacatttggacgtatacccgaagcaatgtttcgctctattaataaccttttggaaaaatttcaccaatcgttcttcttttatttgttattagcaccacgtcagttcgtatccattagtagttatttgccaagcgctgtggctttatctatagcattcgccataagttcattaaatgcatttataaacaatgcttatgcaaatatatccttattttccgagtataatttggtagcgttgttggtttggttcgtgtcattggtgatatcatttgttgtttcacaagcgtttcttctaataccttcatcgggattattgatgacaattagcatggcatcttgttttttacctttgatactttccagaaaaattcacatctcagaaccactatcatacaggttgaaaaatgttgcttttttatatttcagtttggtttcaacatctttgctaatgataaactttgcaatggctttactgatcggcacattggcatttcctatgacatttgtgaagaccattgttgaaagttctagcgaacatgaggtgacaactcaatcctctaacccaataaaaactgagccgaaagatgagatagagctcgtcgagaatcacatggatacaacgccagcaaccccccaacaacagaaacaaaaactaaaaaatttagtactattaattttgacaaatccatttatttcaataaccttattcggactattttttgatgatgaatttcatggatttgatataataaacaaactggtttcagcatggttggatttgaaatgttggagttggtttgtactttgtataggttggcttccatgttggctattgatattagcgtcatcgtttgaatctaaatctgtcgtagtaaggtcgaaagaaaagcaaagttaggtgccattggtaagaagtaaaggattaacgggtgttcgaactacgcaattgattttatacgcacaaacattacaaatcgaagcaaaagaagatgaaatgatatgatatactgatacaaatatgtattaaataaaacataagtattgatggaaacatggcatagagaagcgaagatgcgataatatcaaataactatatgtgagttgtggaagaaagaaacgatcacattattataataaactagctatttaaatgtttattgaagactgttctgcccccttttattcagtcacggtattggtcaaaaaattctttatggaaactttcccatttcttaatccattccagaccaggtgccaaaaatgttgttcttaaatggtaagtaccaggttcttgaccaaacccagaaccgggaacagtgcaaatgccagtagattctaacaacttcttacaataaaattcatccggagttaactctaagtggcgagcttcttgaactgccttgaaaggtaagtctatcttagggaataaatacatggcaccttgaggcttttgacattcaatgccttctaaagagttaaatgtctcatacagtgtcattgctcttgtaattaacttttcatggatggagttacgttctgcttggtccgactcgaatgattcctccccttccactggtggacgaaccatcaaatcaaccaaagcttgacctgtgacaacgggacacaatgaaatcgaggctagtttcaagataacttgtctcatctcatggctgaatccagtgagttccatgtagccacccctttgaccacattcaccagaaacacccttagaagtcgaatgcaaagaagctagctgaacattatcgaatttacctggatgttccctctgtaaatgtctcaaaattttcttcatagaatggaacttggtgcccgggaagatattttcttgataaacttcgtcagctatcactactgtaccgtacttggctgcgacttcaaaaatctgagctatagactcaggtgataggacagctcctgtaggattacctggattgataaccactagaactgtaggtttgatttcgttctgtatagcctctttgacgacagtttcaatttcttctggattagttgaccaacctgaattctcatctaaatagtatggtaaagcttgagaattgttcaaagctagagtagcggtatataatggatattgaggaattggaatcaagacacccgtttctggccctctacagaaaattgataacaagtaattgacagctgcggatgcaccagcagttaggaaaatatcctctgggtatgatatctcgccttcgtccctcttcgttataaattcagcgacacttttccttataccttctacaccttgagaagaagagtaagcaccaacagaaccaccgatatcttccattaaactctttgcacgtttaatggcatctagtttaaacaatttcgaatcaactagctgctgttcgttttggtttaatagttctgggtattgtaagagagacaagacctgtctgtagtaagtcagaggtttctgttgtagttgctgaggattaccaatattggcgttgataatcctgtcaaatggcagagattgaggatccttctccagttgagctttcaattcttcagctctcattgggatggcacctctaacggcgtacttagccttcaagacattttcatttacgtcttccaaagtcaattgttcggcgggataaaactcgttattcgaagttttcaacgtgtggtgtggaaagcgattcaaatgacgcaggtcgtttagcgaagattgaccagataatgaacgtctatgattttgagcaacaatccaggaagagctatgtctctgtaggacgggtctaactttcctgaaagcttttaactttgtactactggctgaggtagaaaaaggagtagtgatatgtggcattttttctgcgcttgaagtgagagtccttatatgatatgacttaataacgtgagttatagaattactcactgtgaagtgatttttggcagacagtgataacatcgtggagagagcaaaataaagactggggaaatatatttatatgcgttcaattgagaagcagaaacaattaaatgcgggggagaaacaaagaagctggtcctgttctcgagcaacgtgtgactagtatgaacaactagagtaaaatagcgagaaagcagtagtagtaacggaagagcttttcctagtatggtccgcgggtcacgatcgtttacaaagggcgcagcaaactctaaatacgtcaaccacagcaggtcagaagagtacgtgaagttgtctcaacgaaaggtcgaaaatcgttaggcttggaccccttcagaatgaaaaaaaaaaaagacgcaagagtgaaaaaaaaaccagtactgtaaaagcagaaaacgtctaatgggaagtgctactatgtaagattatatcatgaatgtgctgtgtattatatatggattatatagccacgaatatgcggtaaataaacatatgcatatatgtgtgtggggcagcgctctgctgtgcaatccttgtttctttgtttcttgggtcgggatttgagtagcgacgagccatcctctgcagaagggaagaagaaagaaaggcagagaggcaaagaaagagtcaggcttatcttatcttaagagatatgccgcttggacccaaaagaaagggaaaagtaagtacgcaggtgtagttttgaatgagtggcagtgatagaggagaccggttatacgatgtgttgggggtgacgagagatgcgaccgtgcaagagattaaaactgcttacagaaagcttgccctgaaacatcatccggacaagtatgtggatcaagactcaaaggaggtaaatgaaatcaaattcaaagagatcactgccgcttacgagatcttgagcgatccggagaagaaatcacattacgacttgtatggtgatgataatggtgccgctagcagcggtggcgctaatggctttggagatgaagattttatgaacttctttaacaatttcttcaataatggaagtcacgatggaaataatttccctggcgagtatgatgcgtacgaagagggcaactctacaagctctaaggatatcgatatcgatatatctcttactttgaaggatttgtacatgggcaagaagctgaagtttgatttaaagagacaggtcatctgtataaagtgccacggttctggctggaaaccaaagaggaaaattcacgttacacacgatgtggaatgtgaatcatgcgctggaaagggttcaaaggaacgtctgaagaggtttggtcccggtttggtagcttcgcaatgggtggtctgtgagaaatgtaatggtaaggggaagtacactaaaagacccaagaatccaaagaacttttgccccgattgcgcaggcttggggctcctgtcaaagaaggaaatcatcacagtgaacgtggctccgggacaccactttaacgacgtaattacagtcaaggggatggcggacgaggaaatcgataagaccacatgtggtgatttaaagttccatctcactgaaaaacaagaaaacttggagcagaagcaaatctttttgaagaactttgacgacggcgccggggaagatttgtatacaagcattaccatatcgttaagcgaggccttgacgggatttgagaaatttttgacaaaaaccttcgacgacaggttactaacattgagcgttaaacctggcagagtagtaagacctggtgacaccatcaaaatcgccaatgaaggttggcccattttagataaccctcatggccggtgcggcgatctgtatgttttcgttcatattgaatttccaccagataactggttcaatgaaaaatcagaactactagcaataaaaacgaatctgccgtcatcttcatcttgtgcctcacatgcgactgtaaatactgaagatgacagcaacctgactaacaacgaaactatatcaaatttccggatcattcacacggacgatcttccagaagggataaggccgttcaagccagaagcacaggattcagcgcatcagaaagcaagaagttcgtactgctgtatccaatgatggcatcaataactttttattctatttttttttttttttcataagttatcctacctgtatatatgtatatatatgaaattcatttactgaatgcggtgaagaatgaagtctttcgcaccttcagtagaaaaataggaagaatccccatcgcggcggacataaagcaagcatacaaaggccttctatcagaacagcgattgcgaacttggagcaacaatggcgtcccaggttaacgccttattactgccggtcatagagtctacgccgcttcatcaaataaccaaggtagcattgacgaccacactcacaagtaaacaaagcgattacaagttcaaagaaatagccgtgccgttaacaaaatcactacaactgtacgagaaggcgcaaagaagacaagatttaagggcaagcttaaaagcactggagagtatcatttaccaaacgcacttccaatggaataacccgctcccacgacatgcgcatctcttccaaaaacactaccactttctactgactcactggccatttgagaaccacagagacttggtagattccatcgctgtaaacaatgggaaactaaattcaacgtcttcaaggagcgtctggctgaaggcggattggataacactgtttaacgttaaaaacccttgggtccaaacgccgccatcgttaatgcgtctgagtgggacagatcttgataccttcacaccagagaggatattcctgataaattctcttggaaaccactacaaatttttaatagcgaacagtcatctaagctacaatcacaaaaaatacccctcccctggcgtgcaaattcctgtcaggaacgctcttggcgaagtttctccggccaaacaaattgcccaacttttcgcaagacagctgtctcatatttacaagagcctcttcatagaaaaccccccgctctctcctgagaacgagctggcattgactgccgtcttctatgacgagactgtagagcgacgccttagaaggctctatatgcgagcttgtgcaagggcatatacgactactaatgccgactccaccacggagcctttgatgtttcattgcacccggtgggaagttgattagttgttgttggctgttatactggagtaaatgtcacgtgccactgtggccgtgtcaggtcacgtgaagagagaaattcggccacagttgtggtcctaaacaaggactgaaaaagatcgcagaaactagcaacgtcggatagcggtatggttgaaccaaagtccagtttttagtcatagccggttgagggatgatctgccgttcagtgttctgcgttcaataatacgcatatatatatatatcaaggtatcaacacaatacttgaacaggttaggctcgtactaaagcctggaagtttttatctttctgtaacatttttctttcttgaggtgtgtgtgtgtatagattagcagggaattatctaagatatgtccagggaaggttatccaaactttgaagaggtagaaattcctgactttcaggaaactaacaacaccgttccagatcttgatgatttagaattagagtatgaccaatataaaaataatgaaaataatgacacgtttaatgataaggacttagagagcaattctgtagcaaagcacaacgcagtgaacagctcaaagggcgtaaaaggctcgaagattgactactttaatccttcagatgtctcgttgtatgacaattccgtttcccaatttgaagaaacaacggtatcgctaaaagagtactatgaccacagtatacgatctcatctcacggtgaaaggagcatgtagttatcttaagagtgtttttcccatcatcaactggctaccacattacaattttagctggtttactgcggatcttattgcaggaattaccattggctgtgttctcgtgccgcaatccatgtcatatgcacaagtcgccacgctaccagcgcagtatgggttgtactcctcgtttattggtgcttactcctactcttttttcgctacatcaaaagatgtttgtattgggcccgtggctgtcatgtctttgcagaccgccaaagtcattgcggatgtcacggcaaaatatcctgatggagattctgccataactggtcccgttattgcaacgactctagcgttactatgtggtatcatttcggcagcagttggcttcttgcgtctagggtttcttgtcgaactgatttccttaaatgcagtcgctggatttatgactggatccgcgtttaatatcttatggggtcaagttccagcactaatgggttacaatagtttggttaacacgagagctgccacctataaagtggtcatagagaccttgaaacatttaccagataccaaactggacgcagtttttgggctaatcccgcttttccttctttatgtttggaaatggtggtgcggaacatatggaccaaggttgaacgatagatacaactccaaaaacccaaggttacacaaaattatcaaatggacatatttttacgctcaggcttccagaaatggtatcattattattgtattcacttgtattggttgggcaatcacaagaggcaaatctaaatcggagaggcccatcagcatcctaggctcagttccatccggtttgaaagaagtcggggttttccatgttccaccaggattaatgtctaagcttggtccaaatttgcctgcatccattattgtgttattgttggagcatatcgctatttcgaagtcttttggtagaatcaacgactataaagtcgtccccgaccaagaattgattgctattggtgtctcgaaccttttaggtactttcttcaatgcttacccagcgactggttccttttcaaggtctgctttgaaggctaaatgtaatgtccgtacgccgttatctggtttgttttcgggttcatgtgttcttttagcattatattgtttgaccggcgcattcttttacattccaaaggctaccttatctgcagttatcattcacgctgtatctgatcttttggcctcttatcaaactacctggaatttctggaagatgaatccattggacttcatctgtttcattgtcaccgtcctaataacggtatttgcctctattgaagatggtatttattttgccatgtgctggtcatgtgcaatgctcattttaaaagtggctttcccagcgggaaaattcttgggtcgtgtggaagtcgctgaagttactgatgcttacgtcagaccggactccgatgtggttagctacgtgtctgaaaataacaatggtatttccactttagaagatggtggtgaggatgacaaggaaagttccaccaaatacgtcacaaattcctccaagaaaatagaaacaaacgttcaaacaaagggctttgattctccatcttcttcgattagccagccaaggataaaataccatactaaatggataccgtttgatcataaatacacaagagaattgaacccggacgttcagattctccccccaccagacggtgttcttgtttataggctatcagagagctacacctatctcaactgttccagacactacaacatcataaccgaagaagttaaaaaagttaccagacgtggtcaattaattcgccacagaaaaaaatctgaccgtccatggaatgatcctggtccatgggaagcacctgctttcttaaagaatttgaaattctggaagaaaagggagaacgaccctgaatccatggaaaacgcgcccagcacctcagtcgatgttgaaagagatgacaggccattgctgaaaatactatgcttagacttctcacaagtggcacagacagacgctacggctcttcaatcattggttgatttgagaaaggccataaatcaatatgcagataggcaagttgaattccactttgtgggtatcatttcaccatgggtgaagagaggtttaattagcagaggatttggtactctgaacgaagaatacagtgatgaatccattgttgccggtcatacaagttatcacgtcgccagagtacctcaaggcgaagaaaatcctgaaaaatatagcgtttataccgcttcaggaacaaatctacctttcttccatatcgatatcccagattttgctaaatgggatatctagccaatgcatttacaatggacatgcaaacatttatatcatctctttttttctatattcctaaaccaaaaagttttcccccttaaaagtatacatttaatatcataatgagatagacactgtttatataataagaaataataggtaggatggtgccatcgtgagcatatacatacctataaatatttaccttatttttattttatttttctcttcctctcaggaacaaaagaaatacaaccgttattaatgttattgtcgtgggacagctcccctttttttttatttacttaccacagatagaaaaacatgaaagcagcacttacaaatagtataatagtgaaagttaataacgtaatatttttgaccttctgccaccacattatttcttttatattgaccgctttgcgcctaaatttattactgctgctatttagttgggaagttttatccaccaataaagaaactctttcttgtctctccaagaacttgtcgatgttatcgttcattatctggatgacgtcctttatttggtcttcggtggcatccccgatgtcacttatagtgttctgaccattcccattactagattggccatttccagaactatttaaagtttggttacggtattcgaccagctcttcatggaaagagtctagtatttgacctacatgcgaacttaaaagttcgtttgtagcgttggactcgtattcctgcagcccacttagtatcctgatgggcaaaatcttgggcatatctactaatgtgaagcaaacgtacacagttttggggtcatggtcatccgtggagtagaaacaatcgaatccgtcgatgagattcattgacatcttggtaactttgttccccttgatcggaactactttgggtaataccatatccatgatcaaattatggaaaatgaccggcgttatctgctcgtttgctgaagttattgtaccatagttttcgtttttctggaacggctggaaacaactagatattgtttcaccattttttataacttccacataacttactaagaccatatgcaaaatcaagcaaaatggaacgttagtctactgaatgtaacatagtaaaattatggcatggggggatgagcattcgcataatcccttttttaaacatttgttaattgtgtagaaatatttatacataccattaaagcgtttcatttggtaaaaatataaaagtccaatgctctaacagcttaataaattgtcgcttttcactctgttcttcaaatttaatagctgttgctccaacttagtcaagtgctagaaaattcatagaggggctttttttcatcattattgtgacctcattttttctttcttcgatcgtttgaggcgaatattacccgggcgcttggtggtaatgcgttgttttaaatattatatataatgaatgtggtggtagaatatatagtttactatttttagataatgcaaatgggtggggtgaaggcgatgaaaaggtggggggtctatcagagaaacctgctgtcacaccagccctttacgacatattgaatctctctcgtaggtgcggaagtcttattggtgactttgcctaaatttagttttccgcatggtttgagcattgtgccgccattgttgaaccatggcttgacgtctgagtgtacgcggaccaaagaacttttcaaatccgccgttgcatgttcgcttgcggattcacggccttgcgaaggttccgtattgcttgtcgttgcaacaaagtgcaaattccagggggtagaatcgccaaaaagatcatttcttgtttcatggaccatgtcagaccataattttttcctagtaattagggcaagcttaatatcgttcgtagagacatttggctcctttttgatttccaaagaccgaatttcggaatacgttagctgcttcaacagatggtcatctacttcgacttcgggtaaaatactcttccttttacatgatgtttcaatagagtataactttaggaaattggtattcaaacttttttgtcttattcttttattgggcaagagctcgctagatgcaatcgaaccgtcggtctcgggcgatggtgatgcagatggccattgttctaattctaccaggtcattttcgtaaatcatgttttctgtagtcgatttgctcctactcttccttcttgaagtcttgccgcctttcttgtcgatgatttggaagtccacagaggtcggacgaagtttggcatcggacgacgcagaaaccagtgaaagggcagaggacgatcgcggacgccgttcgtatacgggaggaaagatatcgactaaatccttaacctcccagtcgtcgaacaaatcgagatcatttatgtttattattttcattttgggcacgaccggctcagccagtacctcatcgccaatcgcgggggtctgcaaatcgacagcgtcagcaatatcatctgtcaagggatgaagtttagaggagctcaatgaagaacagtcgctttgagcttcctcggagaacttcctctttatgctctgtgttaagtggccctcatgtatggggcattcgcccgataacgtcttggcggaatttgttttcctaacttgcgacatgaccgagcttaaggacggggtcatcaaagatgagcgattttcgttcagcagttcggaatcgtctcgagccttcagtattctagtcctcttgaagctattcctcttggttagtgttctagtacgttcagcgcttccttgaccatcgaactgcggcttagtggagtggaaataaatctcatcgctcaccgtcctattacttgtggcggtcttgttcatgctggcgctggctaacttgttattcttcttattagtagcggtagcgtaaaatgacttgggataaaatacctttgatgagtcgctccatgagtgcaatgcgccatcatcacgtatgcttttgatgaggcaatgttcatgcacatgagcatcgtgcattagtgtgtgatttgtgttcacgtccagcagcattctataattatgtcttgttgaaagtgttctgtatgttcgtgtctatccaaagaaacaagtaattgagaaaactagccatcaaatacttgtgaagaagcgagtttccattctctgtttcactcgtttggcgttctcaccatcccacttttatttcattggcttttttaacacaataaggcgccttcagcacctttgccgcgcattaaggatggccactgacgaaaaaccggataaaaaaagacgaaaaaatgccgtctgaccctagtcaggagccgcctcatacaccctaattattttggcgctaagccctaagcatcattattacccgacatgaagcgacagaagccctacggatgtgcggctggaaaagaaagtttcatgaagaaccagttgatatatattttactatatacttttgctgtgtatttctatatgaggctagttggttggtgggaactggaagtgaaagttctgttctttagggtgcagcggttgctgttgctgttgctgttgctgttgctgctgtggttggattgatgcttgtgatgtttgtggtgcctgtggtgcttgtggtacagttttgctgccagtttgctgcgagtatgtaattatggggtgagcggcatttacattaggtgctggattgatggctggatttgttttttcgtaagcggcgatactaggcgttgtgctacttgacatgtttgcaaatgcattattaaacactggaggtgagacagactcggttagttcccttttctttgcaagctcttcgagccttttcttttcttccttcattttttttcttctttcacggtcttcctgttgttttctttgtttggcccttattattttcaattcaggcacaaaaatgttgcgcagctcaagttccaagtccctgatgcaccaagcgcagataaaagtggagcattcagacagcggtttgcgtttatcagtaggtcttgaagacttggtgctgggttcaagtgtggattggggtctgcgagaagaccttctattgccgtgcgaatttcccattatgatgacgccaaaatcacgttgcgacagcgtgtgctgtggggattttgtggttgaagatataagctctataatttttggaggttggcattcccaatgctgccacctgtaacaatgatcacagcatatcaatgggcggttattgaagaggtcagtctccgtgtcttcggtgataatcatgggcgccagctctggttcgcccggacattggaaaacagaatcttggttgtcgggctcttgctgcggagtaaagatcccgtagttggcaagctcatctagctcttcctttgttatgcagaagtcactaggcaattcagggacgtctcccgtctgtagtggcccaacagttccaggaattggtggttccaccgggattatactagattgaaagttagggccgtgatcaagaactccgatatcgatttcatttaagggattgtcctcctccctgcccaaagacgtttcaaaaaacggtgtaccagaaccacttctatctttgagctcgttacgcctggtcaatttttcatctctataatcttgatcgtacaattgccacaattggttccaaagaagatcttttatctttttgatttccttcgacactagcttgtttctgtgccttataaattgttctctttcatctagtttttcaaaccactcactttccaagtcttttttcttgttttcttcctctttcgctaccagtctcgaagatcttttcctccttgtcattagctccgcaattgctctctccttttctctgttggccaaaagttttgccgaatatagtctatgttcggcatacaccggtattaagttagttatgaactcatctatggctttcgaacttttattctctgaccagtattctagcatggacccccaattagttgtaatcacatcataatcaattgtaatcgattgaagatatgcatcgatatcgtgagagtactcgagatgaataagctccactgaatcaggaatgtctgggtcgctttcttttatagtacagttctgtagttttattgggatattcagagtttgagagacttgggaggaagagccttcttttactctgtgaatggttttctttacgagtacaccaacattgggtaaggcaaacaagctcttcatttcctcccctccactattatcatcatccagtataacttcactaaacgtaaacagatgcaagttattcgctaagtagtttttgaagatcatatttttcatttcaattaattttatgatactgtaaatgatgtcgaattggcgtgcaatttcaagctccaaaaaaggtaagtccgtaaccaaatctgaatacgcgctcgagttttgcaagtgatggttaactataacattccaatctttcaattgcccgcttttatttcccgctaattgatgcaataattgcaatctaattctgtcgtacaaattttgcgatccttcatctacgtcgacttcatcattgtaatagttcgagtccttcccgtctatcttcgaaaatacgtcagttacaaatacaccttcatcgaatttgatattcttccacaagcatttggtagagctaccgccatactggtcagtattaaatgtcgttgtagtatatgattcgcagacattggaaagccaagccatcacatactggaagtgccagtgattggccaagtccgcgatcttctcatctaatatttcagaatacggcagctggtgcttgttcaattgggctattatgtcttcggagacatattctttccagtcttcactatccgcattcgcagcgccggcaggcatgctcgctcctacatttcttgtacccctagttctcttcgttctcatcgatcgctgattcaccgctttgtatctatatatgattagccagtgtgtatgagtaaaatagagcaattgatctagtttcttagtcgtgtcactattgaataaataaatgttaatgttgctggaaaggaagaattatgtcacttttgacgctctcgcattccgtgtgcggtgatagcggtaacttggtctagcaacgaaaatttaaaaaggttggaaaaggaaaagaagagctcaagtggacctagaagtcctgctttgccaccgtttaagcaaggaatagagcacgccgttgacacaaattcacagtcaaggacgggccacgagaactttattacaaaatatactgcattacacgaaattcagcggaactctgagcgcgaacagcattaggtaccgagaaacgcttttcaaaagaaatttctaaaagttttattgtgccattaatatcgcggctcaattgttaagtatttcactatgcctaatccgaatacagcagattacttggtgaatccaaatttcaggaccagtaagggcggatctttatcgccgacgccagaagctttcaacgacacgcgagttgctgcaccagccactcttcgcatgatgggcaagcaatctggaccaagaaatgaccagcaacaagcaccactgatgcctcctgcagatatcaaacagggcaaggaacaggcagctcagagacaaaatgatgcatcgaggcctaatggcgccgtggaattaaggcaatttcatagaagatctttgggagattgggagttccttgaaacggttggcgcaggctctatgggtaaagttaaattggtcaagcatcgtcaaacaaaggaaatttgtgtaataaagattgttaatagggcttccaaggcttatctccataaacagcactctttaccttccccaaagaatgagagtgagatattagaaagacaaaagcggttagaaaaagaaattgcgagggataaaaggactgttagggaagcctctttgggccaaatcctttaccatcctcatatctgtcgtttatttgaaatgtgcactatgtcaaaccatttttatatgctttttgaatacgtttccggtggacagctgttagattatattattcagcatggctcattaaaggaacaccatgcgaggaaatttgccagaggtatagctagtgcgctgcaatacttacatgccaataatattgttcatcgagatctgaaaattgagaatataatgatatctagttcaggtgaaattaagatcattgattttggtctttccaacatttttgattataggaaacaattacatacgttttgtggttccttgtactttgcagcaccagaactattaaaagcgcagccatacacaggacctgaggtagatatttggtcgtttggtattgttctttatgtcttggtctgcggtaaagtaccatttgatgatgagaactcaagcattttacatgaaaaaataaaaaaaggtaaagtagactatccttcacacttatccattgaagttatatctttattaaccaggatgattgttgtcgacccattaagaagagcaacattaaagaatgtcgttgagcatccatggatgaacagaggatacgattttaaggctccatcatatgttcctaatcgtgttccattaacccctgaaatgatagatagccaagttctgaaggaaatgtatcgcctagaatttattgacgatattgaagatacaagaagatcattgatccgattagtaactgaaaaggaatacatccaactttcccaagaatactgggacaaattatccaacgccaaggggttgagttcaagtttaaataataactacctaaattcaacggcacaacaaaccttaatacaaaatcatattacaagtaatccatcgcaaagtggttataatgaaccagatagtaattttgaagatcctactttagcatatcatccattactatcaatatatcacttggtttcagaaatggttgcacggaaattagcgaagttgcaaagaaggcaagcattggccctgcaagcgcaagctcagcaaaggcaacaacagcaacaagtagcacttggcactaaggtcgccttaaataataactccccggatattatgaccaaaatgaggagccctcagaaagaagtagtacctaatcctggtatttttcaagtgccggcaattggaacatcgggaacctcaaacaacactaatacctcaaacaaacctccactgcatgtaatggttcctcctaaactaacaataccggaacaagcgcatacttctccaacatctaggaagagttccgacattcatacggaattaaatggtgttttgaaatcaacaccagtccccgtgtctggcgaatatcagcaacgttctgcttcacccgtagtaggtgaacatcaggaaaagaatacaataggcggcatattcagaagaatatcacaaagtggacaatctcagcatcccacacggcaacaggaacctcttccagaaagagaacctccaacatatatgtcaaaatcaaatgaaatttccatcaaagtaccgaaaagccatagtcgtactatatcagattatattcctagcgctagaagatatccatcttacgtgccaaattctgttgatgtaaaacagaaacccgctaaaaacactaccatagcacctcctataaggtcagtatcacaaaagcaaaacagtgatcttccagctttacctcagaacgccgaactaattgttcaaaaacaacggcaaaaactattacaggaaaatctcgacaaattacaaattaatgataatgataacaacaatgtgaacgctgtagtcgatggtatcaataatgataatagtgaccattatctctccgttccgaagggtcgtaagttacatcctagtgcaagggctaaatcggtggggcatgctcgtcgtgaatctttgaaatttactaggccgcctataccagcagcccttccgccatcagatatgacaaacgataacggctttttgggagaggcaaacaaggagagatacaatcctgttagcagtaacttttcgaccgttcctgaagattctaccacatacagtaacgatactaacaatagactgacttcggtgtattctcaggagcttactgagaagcaaattttggaggaagcttcaaaggcaccccccgggtctatgccatcaattgattatccaaagtcaatgtttttgaagggttttttctctgtacaaacaacctcctctaaaccattgcctattgttcgtcacaatatcatatctgttttaacaagaatgaatattgatttcaaagaagtgaaaggcgggttcatatgtgtccaacaaaggccatctattgagactgcagctgtccctgttataaccactactggcgtgggtttggattccggaaaggcgatggatctgcaaaatagtttagacagtcaattatcatccagttaccatagtacagcgtcctcagcatcaagaaatagttcgataaaacgccaaggttcttataagaggggccagaataatataccactaacacctttagcgaccaatacacatcaaagaaattcatctatcccaatgtctccaaactacggaaaccaaagtaatggtacatcaggggaactatcttccatgtcattagattatgttcaacaacaggatgatattttaacaacatcaagagcccaaaatataaataacgtaaatggtcaaacagagcaaaccaatacttctggtataaaagaaaggcctcctattaaatttgagattcacattgtaaaggttcgtatcgtcggcctagcaggtgtacatttcaaaaaggtttctggtaatacgtggctatataaagaattggcatcgtatattttaaaagaattaaacctatagatacgttgttcttactaaatatttcaacgtgtgtctttcaatttttattatctaatatttatctttttttaatattatagtataatttatttaagctgagatctgctttctttaatctttcatatgatgaaataatagttctacataaatctataagaataataaataaagtaaaacaactgcaaaaaacatcgatgtcatccaggatccttgaaagatttcactctggagaagaaaaaagatttctcatttctcaacgaacagttagatgcattcccttccttatccactacaattgaacttagccatttcaaccgttgatatctcttattgccttgattcttgatttggaattcttcgataaacgtatacttttcatctgaccttgttatctttaaatgaccaaaatcataatcaaatccgaggctccaataacacatatgactatgcctgggtttgttctctttggagaagtgcttcacgacagcgctaggttcatctgtagaaagtaatctcaaacattggccgttctcataaaatctgaaatacctgtaataggtgatcatgtgaactggctttaaaagagataacgaactttctgcattggaaccgtatcttacataatttactacactgatgtaaacaccttcgaatttaatatatggcctttcccttaacatacgataatcatcaccccgccatatttccttttcaaaggtatttatatcggtgattccgttaagatccattgccattttgtcgtatatttgcttagaatatatgtacttcgcgaaagttttaaatggcacagaatcgtggaagcaaagcttgctaaaggtggaacaagtcatcgacaaattcacccaagattcaccagacattaatataacttttttaataattctcagtaaaatgtcgtcaggcaagatttccagaatccagcagggttgaagttcagcattttcttcaacagataagtcatctttaccggtttcattttgttcatctggagcatcagtagtcattgataatcccgatagttttttgtgcagcatccactcatcaagtattttttttctgtacagtgattccacattatcatggattttcaatgcacttcgatagaagtttatagcatctgacattgacccatccttctctttcagtacacctttttcccaaatagcaatagcctctttagccctagggtccttttcataatctactatcatttgctccttgagtttagcttatggaacacatgtgtcgtcgccaaagatgatggggaatgtttgcttttatcttgctcagtcgatttcgctatctaggaactacaatccttttttttgtcatttggaaggctctttaaaattccgaatcgataagttcggaggtgggaaaggatagcggtatattccttcccaaataaaaaggctacaaacacattacataaagaatatttgttcaagtaaacatatcctcttcactcaagattacttcgacaaaccatcattggtgtttccaccaatcagcatatcaatctcattcaataaagtaaagtcaaaattgtactctaaggcaaaatcgttaccgtgagatagagtccctaataaatccatagtttctgaattatgcaaagcatcttcagagttttctatgaattttctagcaagttcgtaattcagggtaggcgcacttaaaaaatttaagaagtcttgttttctatcctttttaatcaagttggacttcatgcattggatggctaaaatcgcagaataaatcatgtaaattgtggccttctcaaacgtcttaaatttatttttccaaacttttaaaagataatacagttcatcaacataaccttcaaccaattcccggctttgtttgatttcgtatatgaaaggtttattataggaaattagcacgatatagtaatgaaaccatacgtaagctatggttgggttaaaatctgtcatttccatcaatgacctcttggtccattgtagttcagggggcaaatcccttctccaattgtatacctccagattaaatttggccaagtattcactcctttgaagtagagtttcgtttgggctgaaaatcttggatgcaaaaatctccgttattctcgataacacaatcagtttcttcaaggggtttgcagtggacaatattacttttgggtcatatatgtactcctctataccagtctcaatttcaggtagctcgtctgtttctggaacagtggaattggacaaacgcaaggaagttgatcttccaaagaggatcgctattaaatgatcagcaatgtagcagccccaataaattctacttctcacttcaaaatccattattgacagctcgtcttcataaacattactccatgcttctggattcaaatgtaggccgatttcgtgggcaatcctaaatgccagcccagaaagataccaagccatggggttttctccgcttccaatgtcataaaatgccaaacacaatagagtctggatgattgctaatttcgaagaggacgacgattcagctaacgaagaatcttccagttgaaaaatttttttgagtactatcgtcttggctctttgataaaacacttcagattgttgaaaaagctcagtttctgatttgtatgaaatcaaagatcccaatgcagcgattgcaaataccaattcttcggaacaatagtaacttttagtgttagtatcaccgaagaaagcacttaagaaagtttctctatgaatgaaaaggtaatgtcccgggtatagccatttgaaaaagagtgacaacgatcttaagataaggggacttcttgataaattttttaggctgacctgctgttgctgatatcttgtgcttccatccgtcttcttttttattatagacaaggaatttgatggatatatactatttgtgccaactggtggagggctctcggaaggcattttcttggtgaacgcatcagactcattctcatcgttgctttcagatgatggtagtgctgattgtgctgtttcgccatactttaagattttttcattaggagcatcaccatgatcactgttgttttttaacgaggagagagcattgctagcaattgtggaagacgaggaacttaatatttgcaactgttctttcaaagaccgaatctggctctgtaaagcttctacgtaagtcgtagaatatcttttgttccttaagtcttgttgagtgaatacacattcggtacgaaacttgatacagtttgaacaaggcttttccatgttacatttccttcttcttctacggcaattctggcatgctagttttctcttcctgggcacgttgttattattctggtcattatctgtcacagatttctttaaactggacggaagggagggtgttaccgttgttgttaaaggtggaggtgaaggctccaacatcattgctgcgattgtgtagagcttcgagttttaaaagggctatttttgaaaacttacggcgatgtcaacttgttgattttgctttgtttcgttcgggatggatcggaacatccgctcacatatgagaggtttacactcttgatgtatatgttgctctatcttgtatacggttaagtaaagtgatgtattatgtatatgtatgtatttatatatatatatatatatatgcgtggttttccatattgtatttttcttctctactctatataggcattactttgacaggaacgagactaaagaagaggcaaagtgctgcgggttgtccaggaaaagattatggccagcatcagggacttcaacgtagctagcctttgccttgttttttagcattgattcagtagtcaagtagcccgcatatttatccatccaatcgtgctcgccatacatgaacatgacaggcgttgctgggttcaaaaaacgaacgttgtttattatcggatctctagcgatcagattcctttcaaacaaatgggtgaacaccttgattgtctgtggttgcaccgtctggttcttcccgacaaatgagtgcaaaagatagtccttatatatctgatccggaacttttacgtatgcggtggagatgtagttcgagcacaatttggagcctatgggtcccatccacttcaaaacgtttagctggttttcaaagataaaccgcggtacgttcagctttcttgtataatatcgggacgatgggtcggtaaacgtaagtggataggtggtgttgggctcccatttgtgggtgatagcatgtatactgttttccacaccaagaggagatatgagacacagtttctcaatggaatcagggtacttgagggcgtatttgaatgaaatatatcctccgaatgaatggcccaccacgtttattttgcgaagcttgttatccttccgccattgctctatcctgtctacgaagtagctttcgtactgctccaggtgtgacttgatgtcctctgctggggggcgcttctctatcacagggattactacgtcatcttctatatgcttaaacctgagagacttgatcttcttggttttgttcacttgcaatgctggcgcctctgaggcaccattggctggcaagtcgatggcatatagatctttaatgttgtctgacaggttctcaaacgtcctgtagaacgccatcgacgaggcagcgtatccatggattagtactgtaggcgtgcacactttgttcgcacgcttattgtggaaatgccactggttaatcccgcctggagtcatcgtgttattaacggacccacgcacagtggtgctatccataatttgctgctgcagggccttcaggccctgcacgctagcacacaccttggcgtctgcagtagtggtctccttctcagttttgctgcaccatttgaaagtgtttgtccacattctactgaagaaaactacgcttacgtatgtatatgtcctgaacaatgagagaaagacctgcgaatatacttctactactccacgtacaaaaaagagcacgctgctttatttatacttttgtgccacaagaatgatcaacatcaacataaatatcaactagtatctgcaacacatctgctccacggaactaaacccgttgagcagtgccccgtggaaacgtaaactatcgcaaattgggattaacaagccaaaaacagccaagcaagattcacgaaaccgcgcctcgtttggaccccgaaggcccatttaacggccggccgttacaagcaagatcggcagagcaaaccactccccagcaccacagcacatcactgcacgagcaacaataactagaacatggcagatagcgaggatacctctgtgatcctgcagggcatcgacacaatcaacagcgtggagggcctggaagaagatggttacctcagcgacgaggacacgtcactcagcaacgagctcgcagatgcacagcgtcaatgggaagagtcgctgcaacagttgaacaagctgctcaactgggtcctgctgcccctgctgggcaagtatataggtaggagaatggccaagactctatggagtaggttcattgaacactttgtataagtgtttgttgtttatgtatccgcatatagcagttataacagataaatggcacttttcgcacacccgttgttttatctccgatagtacgtgggcctttatttatggtcgtttaacgaaagaacggcatcttgaattgagcaggtatttaaaagataggacgagaaacaagcacatgatctgtgtcgaaaaaaagtagcaaagagaaaaagtaggaggataggatgaacaggaaagtagctatcgtaacgggtactaatagtaatcttggtctgaacattgtgttccgtctgattgaaactgaggacaccaatgtcagattgaccattgtggtgacttctagaacgcttcctcgagtgcaggaggtgattaaccagattaaagatttttacaacaaatcaggccgtgtagaggatttggaaatagactttgattatctgttggtggacttcaccaacatggtgagtgtcttgaacgcatattacgacatcaacaaaaagtacagggcgataaactaccttttcgtgaatgctgcgcaaggtatctttgacggtatagattggatcggagcggtcaaggaggttttcaccaatccattggaggcagtgacaaatccgacatacaagatacaactggtgggcgtcaagtctaaagatgacatggggcttattttccaggccaatgtgtttggtccgtactactttatcagtaaaattctgcctcaattgaccaggggaaaggcttatattgtttggatttcgagtattatgtccgatcctaagtatctttcgttgaacgatattgaactactaaagacaaatgcctcttatgagggctccaagcgtttagttgatttactgcatttggccacctacaaagacttgaaaaagctgggcataaatcagtatgtagttcaaccgggcatatttacaagccattccttctccgaatatttgaattttttcacctatttcggcatgctatgcttgttctatttggccaggctgttggggtctccatggcacaatattgatggttataaagctgccaatgccccagtatacgtaactagattggccaatccaaactttgagaaacaagacgtaaaatacggttctgctacctctagggatggtatgccatatatcaagacgcaggaaatagaccctactggaatgtctgatgtcttcgcttatatacagaagaagaaactggaatgggacgagaaactgaaagatcaaattgttgaaactagaacccccatttaatatatctctgcgtacatatgtatatatatatatgtgtgtatatacatgtatgtctgtatagaaaacgcatatcaactgatatatatacacgtgaagcaaaaaaggcattgcctctgtcagagaaacgaactatcctcgttgctatagtgtcttctgcacttatcgcgtagactttctattggcactctgtcatggcatttaatcttgtacacattctttaattcttcttgcaaaagaaggtactcttcatgcaaatgatgactttggagtgaattgactaatcctgagtcgttccagaaactttttaaggcgttcgtttcatgatttattatgtcatccaaccgtctcatattaggtttcgaatttgttacaaattctcgccttgataacctctccaggtcttctttgttgcatccaggtacactctctaacaacattgaaccattgccctccggattcgcactgtcatatttattagcctcttcgccgcacatgatgtcaatatcgggtcgatagctgtctatgccgtctagatggcccaccttatgaaacacaagacaatgtgctgccctttcggctttcaaaaaactgtcaattctactttcccttagcgtattgcgctcacaaaacggtgaataatcgtattgcttttcttcctcgatgtggctcaaagtattcagatagtcgacttcgtctacgtccatatttatcccatagagatcatctgcagtcctctcctctagtacttcgcctgttatgggcatcgaatcatcatttattacccttgtcgaccttttccgtagcggtgtggtaaaattgttaaagttggctttgttgaaccttggtgttttccagggcggcaatgacggtagttgaaacaacttgccttcgttcttatcaccattttggttcatcttactttgtcacagctatttctttccttcctgaatttgtccttccaaacctagttccctgttcttaatttccttttatttaggtttttttttttgttttgtcaagagccgcgcacaaaatatggtattattatagaaaagttggacttaaaagcttgaaaaagcttagattttatattcatatgctggtatatatgtacgactaaataatataaatttgattataacaatccactcaaggtcagcttctccaggaatggtgaaagatcttcacgacgtatttcaattatggaactttcaaaattatctattctcactttagcatccgtttctgcagttatttgttgaaacgccatgctgaaattattcaaaataggtttttttgtgtgtatcgtgtctagtccgcgaggatacctaggtgttaacccagcaaccaagtaagtgtccgtattttcatctatgctggcaagcaccatgggcaacaattgcttgtcttcagattccgcacagcattctatgagccaatttcctaatcttaataacgtcaatgggtttctgtacaagtctaaatcgggtccgtcttgtaagacgcataatctataaattcttaaatgcttgattaatttcttctccaatatagcaaccccggtattaaaaattgctctctgtaagtcttgtgctagttgaatgccacggtttaatagttccacctttctgtcatctagagcatcccaactgagccaaaaattcgaaacccatctttttctcaaattcgtcaatttttgagcgctgttatcttcttcttcctctccatctgtatcgtcattattgtcattatttattttcacactatccttatcagttgaattacctacttccaaaagagctgttagtgcttcgacaaattcactggcacttatggacccacgatatccaagagttctaacaaacccatctctaattatatcttgcaacccataacgatccaaatttttgtcaaatattatcccaagttctctcttaatagaatgatccatgtataaccatgtttcttgtgcagtacttaatggtatacccattctagcaaacatcttatgcaatctctttttcccattttcattccatagggatagtttggcattgacatagttagaataataaaaactgtcgtacaatgaagaatgcctcagtaagaaaaggtagtaatccggttggatgtttaacgtcaatgtatcaggggtctttactgagtttctactgcttggtgtgagacgcttcacttcatcttgcaataaggggtataatcgattgtaaacttgagcatatgctatatctaacgaggtcgtaccaagtatattcaaccacaggtttgaaagatttgtttctccgatagcagacaataatgaatagatttgtgcagatatcgagttaaccactgttgtgccttgagaatagtattcctccaaaacaccttcatattcatggatttgcttctttcgttgctttctttttgagagatcattcggtcctattgaagaattacctcttttattagatattgtctcatcttcgtcttcttcgtcctcgtctgtgacttcatcggcatcagttgcctcatcgtcacccccattattatcgttctcgtcacctgagagctcatcgtcaccactctcctcgtccagttcaagcaatttatagtatgcttctttttgttcgcctaatgtgtcatccaccgtaccgtcgtcaaaacattggatgatttgtgatccaaatatattgtcgagattccacggtctatgagcatccaacacgtagatgtctctcctgaaactttgttcccccgacttttcatctgtatcgataacatactcttggggatcgatttctaagaaagcctccagatcaataacgcctccaaaccctactaatagcagactatttatattgtcatccaattgagaatagtggcgtcgtaattcagagtacccaaatatcggtactatttgagattgtaccaattgttttttgaataatagtgacaacatcttcgtcgcacacagcgcatcgatgttaagacaagaaacgaaaatgaccaattgacatgatgaatgagacgatgaattccttaagattttgttgtaggcttcgctaaactggctgattccataatacatgtgcgagagtatattcttgttattatgtgccttctctctagtgtttattgctacacttttattgctctatagtgcgttgtataaagtagccacaatggattgttggcattactacagcttcattatttactgaaatttcttaaaacgcgttagatgatatgttgaaaaaaaaatacgcgtcgtgaatgaaacttattaggttttacgactagttaaagcaagagagagaagatcgaattgactaaatgtcttcactttgaatttattctagtaggattcgcatggctttttcataataaaaatctcgtttatttatgcttttggttggttttcctttgataaatgcggcccttgctttgtttgtggttgcaacgagttcgtcaaatgataaattgacgcttaacacagacgcatgggaaccacgtaattgaattaatgttttcttctcgaaacaattgcaatgtgactttcttgttaggcaatgtgagatgaaagatggcctttacctttgcagatgtttgggtgtggctctgagctgtcctttataattatagagataattttgatgaaagctcagaagacctttaatgacgaaaaataggcatggtttgccaggcaaaaaacgaccaaattttactgtagtatgagtcaaagtcgctggagtatcgttctcatctttgcattgtttatttttggcagcactggagtgaatgccttcttcaatttcggtcatcatcagcaacagcaacagcaacagcaacaatcatatgaagatcaagttttaaataacccttgtgatgggtatttgtgtccggacaccctaacgtgcgttgcacagcagaaagactgtccttgtcccttccctaaatctcagttgaaatgtgtccttcctgataataaatttgtttgcatatccaaaccagccacacacaatgaaaagtttagagcaatatatgatgaccctgtcaagggccccaaagcaaagaacaaggggtttagggattgtggatgggtatcagatgcttacaaaaaccattgaaatctgtataaaaaatacatacacatacatatatacatacgaaggatttatcttctcattgatattctagtctctatttcttccgggaacccatctcttatacaatacttcaccaacttgaaaactattgaacaatttagtaaagttgtttgatttccatagtgctatcgcctcctgttccgagattagtctctccacgtagcataacacaaacgtcttctttgcgccgcccacaacacgggctatgctagaataccacgtataatctttagagacgtcgtggtcaagacccataacacaaaattcagcgtgttgaaatggtggccctctcttatataataaataatcgcagccgaattttataccagatcttacgcaccaaccgtgtgatctgtagtgatggtatataacgtatgatctgacaaaggagtgaatatctttatatttggcatcgaattgaaacagtttccctgccaggcacgcgggagatatgtcaagaacaggaagtgcaaaagttaaaaacatagcttccactggcattagttctagtgactctagtggcaaaagatcaccgttctcatcaagaagattgttgtcttcatctcttaaatttgattcggaaatgtcttgctgttgtgcaacgatgcccacgtcttctgtttgttttagtttaaattttcttaatgattctcgttgtttctcaaggaggatgttttcctcatcgatatgaccacctttttttcttaattctagtaattctctttctaacttcgcacgttctttcttgaactctaatctttgtaatctcctctgttgtgtgaccttctctaaagtcatctccgtttcagtattactctttgttcctccccgattgtggaggggagtatcattgagacccagtctggcctctgttctagctttccatgtaggctcactcctgctaaattgaccagtgccaaaaaatccattattccaaagatatagcatttgcttgtcatcttgaaccgtgatgtgaagagtggtatctcctataaaatctacatgtactttatcgttcagtgcgttcgtactcttgtaatagcggtatgcccaatatagccaagataacggattatgaaggattaactctggaaggtcatctacggggtgaattggaagaggatacttgtaacgcttctgattgaccctccctttagacatgctccttcttgagtccttcgtacttattgtcttttcagcgtcgtgttacaatgaaacgttttagcatattgaatttcgatggaagttcaaatgttttatgcaccgaaatgaaatactagagcaaagagatgttagtgaaagcaccagctaatatagctctttcaaatttacgtgaaaaagttatgtgtggcaatataaatctatagcaagagtggcttctataaaacatttttgacaagaaataaaattcagataccgttgtagtcttgagaaatcattgtgctcacatcgattaacttcgagcaacataaatcatgctatcatcattaaaataaagtggaagtattaagaacagatataatagcacgagaaaaaactcgttcaactaagtctagacacacctcctggtgttatttagtccgttctcttaacaaccaaagcctacgagctctcaaacagctcttttgttttaacttcctatagaactgaatgggaaacttgcatcttgaagaaaatttttctctttaaatatctgactgaagtattgatcccttcaaaaaaaaaaaaaaagagagttggttacccatatgggaataatatttcttagggctaattgacaaaggattgctaacagaaaatgcaaaggactaataacttgaatcatttttatatcaggtttatataggtatacgttcagtctaattaataatttatagtttacagtagttttttacagtagtttttttttttttttttcagttccatgatttttttgttcctttgattcgtgtagtaaacctcctcttcttggttttcacgatatacttagctggatgccaggtctgtaaagtattgacgcaaaatcagtgaaagcatttcgggtagttcgcttatatcgtgtacaacaacataaaattcaaaaggaaatgtgtccaagtatttggtaatctttaattgcggattgccatactgatctggaatgtagttcacttggctcatgtctaagatggattcattagaagtaataccatctatgatgacaaaaaccagcataattttgttttctctagcacggcggaccagtttttgtattgtttcatggtcttcgcaaataccatcagagattacaatttctagttgccattggtcattatgtaccatagcgcgagcacgttcaaaaattttagtagattcagccacaagtttcttaacgtctgttttagtttcttggaaaccaaaccattgaaaagctcttgcgccagattcgttactaaattgttggtcaaatgagtgaacttctttaatattttcaccgaatttgacaatagataaccctccagcctctagctgagttaacgtcttggagaccaagcataaactatcaaaagcgagtttaacgcatttagattcgctcatagacttagaatcatcaagcgcaatcattatttgatactgacgtttgcttggtttagttcttctcaaccagattttatctttacggaattgtgaggcaatatatggaatgatccgtttcatattcagtctcttacctgttttgtaatcacccttcagctttgtagccaaggtaggttccaagattagtcttaattgttctccaagacgtgatactaaatcggcggtcgaaatttcacttttatgccacaattcacgggattcttctaacgatctttccggtgtcaaactagcacttgcatcaggtggattatcctcaatgttttcaattaaagattgtatttcactgtcatcctcttgatcagccgagaagtgttcatttgaaagttcgttctcaaaatcttcctcactctttcttttaccgatgaatcctgactttttgctgtcaacgtcattgttagcgtcatgcgcgtcgatatcagatagcatctcttcttcatcaatatccattttttcatcatcggcgtcttctactaactctttctggtccacttcttgctcctccctatcatcatcaatggccatgtcttcatcaatggtttgtaattgatcctgtgttgcagaacctaaagcttgcgtatctgtttcagtatttgcaccctcaacatgttcaaattcatcgggacgttcattgtttttttccaaattttcgtcctcttcgccattagtttgtgcttcttttatatcttgacgacgtctatgatattctttcatgctatcacctagttgctttaaagcagccgtagcctcttcgcgtgattcttcattattctttgtcacatcttcttgatcttcttcataggtattctgagtcgttcctgaacctccaacatcgtcctgttcttgtgtgtccgtagcatcagcaccagcacctttggatccagaatcttgttgaacggcagcttcttgatcgatgtcttcagtatcagccttttcctcaacgccatcaagaccttctgtattctgctcacctcctttctctttgttttcttccatagcagcatcttgctttaactcttcttcatcagacatggcttgctcttctgggccattttcttcgtcttcctttccctcatcattagtcatatccacatcctcttcagcaccttcttcttcgtcaagagctgtttctgtctcgccggcatcttcctcaggaccaggttcgtcgttttcattatcactttcgataccggattcttgtttgacttcttcgtcttcgtttccaacctcttccttgtttaggtcatcaggcattccatctgacatatcaacatcttcgtctgattcttcatgctctgaatctaaattcatatcttcaggaaggtctagggtttcgatttcaggaacattagcctccaaatcctcgccttcttcatctttaacttcgtcctcctgttcaccaacgtcgttttcctcttctgcattttcatcgttttcaatttcctcatcgccatcttcaggtgcatttgggtcctcatcccctccttccttgttatcccgctgttgttcgtcattttcagcagcttgtacatcttcctcttgattttttccatctaaattctggtctgtatctttttcttttgaattatcacttgccttatcatcccacattttatcatcaatagcgttggggtcatcttcattcaggtcatcaatttcttcatctaattcttcttcttcgctatcagtatcttcatcatcattttcttcaccattagacaaatcttccaattcaccagccatatcgccctccatctcaactgcatcatcttcattctcgtcatccctctcatctttatcttgttgttctttgttttcgttttgtgcatcctcagtcaaatcttcgtcttgttcgacgtctttattgttattttgagcaccttcaccgtctcccaagcctgtaccctcttgcaagtttttgtcgtcaacttcttcagatggtggctgcggagaacagaacccatttttggctaagctatgcaatatcgtcgatagaatgtacataccacgacttgtgttcgtgtagtagattctagatctttcaagaaccacggtcattgcgttgtaataacgtgtgattaccggtagtgtaaaggatataactgatttaacgtaaattgattcagtagtggtaaaatcaaagtccttcaacaaggataatgctgtctctatatttttagaaacaacactggatcgtaatagtttaacgtttaccataactttcttgaagctagctgataaccagttatcatcagtttcggatatagattcaattccatctccaattaccttctggaaagataatataatagatgtgaaagtacggcggaaagcctgttcaacatcttccaccgaagggcctctcttctgttcctttttaataggaccccctttatttgctttgatccactctataatgatatcaaaaacgaaagcgttccctgtctcctttgcattttcaagcttcttcaataattcattaatgaataactcaaatctagaatatgactcgataaatgaagaatcaaaaattcgactggaattgaagtgtacgaaaaacgaagataaggtcgattttgcatctaacaagatcttttgttgttctgaagttgctgagtatttcgaaataacagacaaggtctgtgcggcatagtctaacaaagaaggcagccacttttcaaacaatctgacattatctacattcgcttttaatgaagaatgaacaatatcgccctttaagcaagtaaagtgttctaggtctaacatcataccattaatcttacagtaatcattcgtgaactctgatagagggtgacgaactgtaatcagggaaaacatcaaactctgtgcgagtgccatacctctttctatagcagcaacagggatatcatcacttggattcgatgcagcgcttctcagcttgggtaaaaggtcaaggattttgaaaaagaatgcgtctgacgaatttaaatattcattattgaaaggggcaatgtttgccaaaatagttgttgtagaagattgaactttttgaatgtcttccctaaaattgacttttaaaccgattcttctcaattctttcaatgcatcacctaaaagtttacttttttgagtcttcaagtatgccaacctctttttgttctcctttgtatatacattaggggtttccttacgtaacctttcagcttcagcataaaagtccgatgctaaatctgcgaagttagggaattcctgtgatgatatcttttccaagtaggagtccatgttacttgctaccgtgtcaatattccttaatggcgcagctctcatactccaagtagaaatttctttcaccaaatttttcgaagcctctaagttggggtcttcgtaaaaatgttgttttaaagtagggagttttagtttattttcgttggaatacaaaagaccggcctcaataatggttttcgcatccccatttagcaaatcacggtattttctgacaattttgtaaaggttgttatgagacttacgagaactttgtttcagggcatcaacgttaacatctttccaactggctaaaagaattatatcgtcaatttctttttccagactcttttttccattcgtaatccgctcatcaattaatggtttgaactgataatagaattttatagtattatggagcaagcccgctatcttcgagctcctcaatccaattagttgaatgtgcttgtagaatgcttttacaagatctagcctggcgttgaattcgcccaatgtactcttactaaaaaataagttaagtgagcttaccaaaagtgtagcgttaggggccgtttccttcttttcactaacaaaatttgaaatgacaattgactcgtacaaataaaaccaccattttccaatagattttctggtttttgcgtcttccgagttgaaaagacctttccaggtgcgtaattctagttttctccatgaaactatcaaatctgtaatcagtttaacggtgttattcagggatacttccgaggaagcgtatttttcccattcagctaggtatgtatatatttgttcgatcttttgaagctgtcttgctaagggtgttttaatggggtagtttaaaaattcttgggaaactcgatataattctttgagggtggcatgttctggccactgcttcaacaatttcaagactgacttaagcacagtttcaatgatatcacctgctttttgaaactccggaatagagaaatcgtggtaaaaatcgatattaccaaaaacttccgtgtttttgaaagattgtgtttctgcatcaagtgtattaatcacagcagacaacgatccgcttttcaactcttctatcctggtgttttttaaatcttcactcaaaattgttgttattatcgcaccgctcttcaactcagaagaaaagttggcgtcatgatctttgtcaaataccgagatatatgtgtcggcaagcttgaaatagatgtcatcaagattttcaggactcgaaatatctttttcattagttaccaaagctgtgtcctcataatctggaaacagctttctaaagtctgcctcgtaatcatctgaattatcattgaatttgaacatatttgacttttcgttttcctcctgctcctgtctgaaacgtctcacagaccatcttgaatacagagtatacaaagcagcctcaaaaatttccagtaaatttgtatccctcttatggaacttaaacagcgtcaagaagtacatcaaaaccttttcaatcgaagtatcttccatatcaccctttttgaagaaccttgacagctcatgataagcgcttaaaacattctctgcgcatgaaatattgatagggtccatactccataaaggagaaatttggaatgatgctctatccttagatttttgaagcttcaataaatcaaagccaaagttgatactgtaaatatatcccgcgaggatatcatttaaatcagcaaattttgaataaccgctttcgagacgattcaaaaaatgtgcactattttgttggagcatttctaatctacgatccgattgatctgaattgcacttgtaggaactcactagctcttttatttgacgagaactcatagttgacgacaaaaatgccatccattcatcaaataaagagtcaatagacatgcctgtacgatataccctaggggattgaggtgcgtcgtcatcgcttatggtattgataagtttttctgtgaaaatctcctcatcgccactgattactttacgaacatttctccaacttttcattaggttttgagaaaatgtctttgtcttcaaaaataaatcatataaaacgtaatcgtgtattgccggatcatagggagaatctgggacgaatagcagaagcaaacctgtaccaaatgtgatccaagcttctcccagttcttctaatgatttcgaactttcagccaaatctagagcgggaaagatgtattctgcaaaagtcacgcgtgtctctgaagcagttttttcttctatgagagagcaaagttctttcaaagtcaatttcaagcagtccccgccgacgtgaatatcaataacttttctgagccatgacagtaacatatttttatagtactccatttggctcttaagtaggttaggtgaacacttgatagtggaggaaagtagcaattctgcgtcactaatagattgtttgatctgatttcccgaaaatgatttcaaattattagatttacgaacgacatcttcgagaaactgggatgaaaatatggtagaagtaaaggaagtcaatttagcatttttttctgtccaaagaacatcaaagataggcggataattgtatttgttggtaataagttttgtaagtttttgcgtggctaaagaagaagcgggagcaagttcttttattagctcggctgtgtcaactgagaaggtatatctgatcaaattgtcaaattcgtcagcaaaataatgttttcttttgtttaaaaacttatttgaaattagttccaattcatttataccatcttctaactttgatagcaagagattaaactcacttaatttattattcaacacatcatcatttagcaaccggaaaacgtccatcaaatccttaatggaattgtatgattcagaaaattggagcagacgtactttgtcaaatttttcagataaattaatgagcttttcgaaagctagccagctgttggaggttgtcggataattttttctgaatatatcccatagtaaagttatggagtggcccctcgacaactgtaaaacatcggtaaattccaaattgatgttaaggaagggagttatctcaatgtctgatttggattttacggacgcaatccagctatctatcaactccttatatactcttagacgtgcttcatcctttgtaacggcggtttctaatgctgcaattacaattaccagtaaatcccaataatattgatattggttggagccgcaaaataaactttccgtcttaaggttttcagacattactgttaaaatattgtagagaatacagaatattggaatgcgaggaatattcttcaaatggcgaccgttaaaggcagccgcagataattcaatatacgtcagttcgtcaattttaccatgagttgatttttcattgattaatttgagagcgttcaaagagttgagtagcagacgtaaacttgataataagtataacgactctggagatttgatcttatctgaatacttgctgactgttggaagaacatattcgttcaaggtaagcgagacagtttcctctgtcaattgcttatcatgcagccccaaagccttctggaattttaggtttgcaggtttgtataggttattaatcttttctaagacacccatatcagtcaaaaatgttataaaaacataaagcctttctgcgatctttttttctgagtactccgtgcaattcaatacattattggcccatttaccaacttcccctaaatgggaaatcggaataacagcagcaagagattcttcaattggttcttcgtcagataataataaaatatcatgtacttgtgcaaatatgcatggtctgcttaaataggatggaacatagtgttttaatggtatcgacatatcaggttcatttagttttatttttttgatgccatcatcaatagaaacaaagtctatattctctccaagttcaaagcctagggtgaggcgatcgaaggctgtagaacgactgtgcaattcgtcgatataaatctccacacctctgtttctcatagctcgggataattcaccatattttggatccatggtcaaaaataatctgaagttagggtggggtttgagaacccttggttggccatcttcttggctacattcattgatgagcagcgacccgtctatctccaatagagagttcagtctatcaagaacagaaggagaacaaagattagcattatctaagattagccaatggcccttttcaactgctttgaccaacatgccatcaaaccattcaaatttaaccgaagcttccttagtgatgatttcagtcattttttcaatattcatactcatagtttttaataggggatgcccttctaagtgcgaaaagaacctattaaaacgatttctgaaatcttggaatttctcaggtgtgacgatattattgagcaaatatttcaataagttcaaaccttccatgattgcggtagcatttggtgagagcttcatattcatcgagattatttctcttacgatatttgttaactcctcagtgatatatgatatttgtctagtcaaatcaacttgttcataaccaccaaggatatccatactatctatatcactattcatggaaaacacgtctactctgggacccaagattgaagctaaaaatcttatcgtttccgttttaccggagtttgagggcccaacaagtaccaacggccaattattgttgattgctttcaaaacagattcataaacggcgacattgcactctaatgggaaaagattctgggtaattggatagcggtaatggggatttcttagagctacctcgttgttaatttgaacatagtcttctgtaagtttgaaaaagttctctttagttgagaatttaccaaaaatatcttcaatgagaagctgtgctttattcttatcgctgatagtacggaacctctgcttaacgattatatcaacaaagtcaaacacgtccacatcttcgcaaatcgaatattggttgagtaactttagccaacgcaatgtatctctcaaattgaactcccatggtgaaccagaattaccccaaagttttcttttacagacttgatcctctaaagtagacattaacttaatcattttcgcgatgatatctggctcaatacttggatataagtgttttgcaatcaaaaggagatcatcagatgtaagcatgtcaataaataccacgctaaatcgattaacgaaagatttaggaagacctttcctaccaccaccttgatactgaggattttgagcagcaaagaccagaaaattggggtggcaggaaaacgatatgtccaactcggggatatacgcttcgcctcgatgatctaaacaggcattcaacccttctaggacggattgggaggctaaattcatttcatctaataaaacccactcacctttcttcattgctcttaaaaacggagcatcgtgccataaaaattcaccacttcgctcaccaggagcgtctgcaccgaaaagatctactagatccgtttgttcagacaaattgattcttgtaagcttatttcctgtaatattggcaagagcggtgattaaacttgttttaccaacacctggactaccttcaagtaaaattggcttgtgtacttgcatagcccgtacaacccttactaagtttgaggcagtagtgggggcggttaagttaaaggatgaagactgagcatctggaaatcttggtattttgaacattccgacttgtaattcatcctgagtcacaataatttcgttcgtttcaatttgttgtagttccaaatcgtcaccacatagtttcaatagttgtataatacattctgttctaagtgactttaaatcattttcgttttcagctaagtaagcagtgttatttgtaccaagggcgtcaataaaaaccattgaggcaccttgaattaaggcagttgacttgttctgtattttcggaaacactttattaataaattcaacccatgcaagtatgtcacgtaaagaaatgacaccacttgttgcatttccgcctcccagcttcttgccaaaccattcagagaatttcacaattggattagcaagatctttcaagtcctctaaaagccttgaggatacgatcatgtttacatcgttgaaatcttccatggatggtacccatatttcagtaaatctatttcttaacgctggagataattcttttttaccgtaatctccaccagggttcatggttgcgaagaattgaaagttttctgaagccgttacaaggctatcggatgaaccctgttctgctaacaacaaactcctttctggctccaaaacactatttagtctttcaagaacggaatcatctgctagcgatatttcatcaagtagaaaaaaatttcccgtcctcatagcttgaatcagaggcccgtcactccattcaaataaaacattcaaactatccctcagcttttgtatttccagttgaacatcttcggctatatttttattatctgacttagaatatagctgtaataactctttcaagtctacatcttggtcattagcaatattcaatgctgtttttaaggattttattagcttatattgaatttcagacctgttacgaacaggtctttgagcacctaatatgtctccagtttctgtgttttgatgggcatttagtgtgatcagttctcgacccatgaattgcgccaataattggcaaattgttgttttgccgcacccagtttcacctaccagtagtactggctccttattctttaaacaactagaaactaagacggatagtcggcgcattccttttgtccaagtaacagagccaatggcttctaaggatttatcttccagacttgcataatattggtccatatctaatttaactttcattactttttctaaagtctttttgactgtaactttttcttgtggagttctgcacctttctgcaagaagcatatagccactggcagcaagctgctcatatcccactgcgtcccttaaagcccagcggaaaagatcacgtagagttgcaaaactatttttctgttcgaacaaccttgaagcggaacgttcgatggataattggcggtatacttcaacgattttctttgcatatgatggggcaatttggcagcgctcacgtaggataatttctaattcatcttgcggaatatcgtcgaagtgcaactccagaaaacgattcctaaaagctcttgaaagaattttacggccaccgtatatcccaggtggattctgggtagcaaaaagaaggaaatcaggatgaggatgtacaacttcttgtgtttctggaataaaaagttctctgttatcgtcaagtaacctatttaaggcttctaaaacatcggttggggcaagatttaattcatccaaaacaatccaatatccttttcgtagtgcctcgactaaaacaccttccttaaacgacagctttccggtatcatcggtaacatatgtacctaaatattcctgtaaatctgtatgctcatggttatttatacggacaaacttatggcccgttatatccgcaagatatttgatcatactggtttttcccgatgaagttggaccttgaataagcacaggaaatcttttgcctgatgtagctcttaccaaattcatcatattcttttcaacaaaaggcgtaatgatatagtgagcttgttcttgaattgtattagggccctttttcatccaataatgcttaaactgaacataatctggtcctggagagggaggtgtctgtgacatgattgacttgacattttttagcctccccaatgtgaatttttctattactggcttcagaatggcctcagatttttggtccagtaaagtcaaaaaactcatacagaatccatcatacagggaacggcgtagaccgtagatatgaataatatcagtaacataaagcaatgtacgcgtcagggtacggatactaaagtgtggtttttggtttgagccatcaactatagtattgttatcggagagttttttggcttcaaggtaaagttcagcgatgtcatttcctacccattcatcgctgacgctgtactttccaatatatttatcaattatggaaagcaaatcagtaatatcacgttccggagaatgtacatatatttcggtaaatcttgatctgatacccataggtaagtctcttttaccaacatcagtagcggggttcatacaagcaaatattctaaaatcggggtgagcttttataggctcagcgtcacccttttctgaaagaagaatactacgagaatcaggctcggtgagaaggtcagaaatactttctaaggtatctgcggttgctaaattcacttcatcgagcaatagccactccccagccctgatagtctttaccaaagaaccctcgacaaaattgaagacaaacgagttttcaatagagctagactgggcctcaaacttcttcactgagtcattgaagtcagcccatttgtcaagtaacaattttttttcatgagtattgagtcttcttttcttcttctttgcattttcgttttcattttcagtgtttgtaatttttaatatgctttgagccattttgtacgcttcgttccaaagtttaacaacgttcttccattgattcttgttgaagcacctatgtagcatcttgtgaaacttctcgttcttctttaaggaaaatgtagcattaaaaagagtttcaaaattttcttgtataggaactgcaactgttttagaatttacgggtttgtacccaccaagaagatcaccagtttctgtttgttgtgaaacattgattaccgttaatttttttgctaacatcttagcaagttgttgaacgactgtagttttcccggtacccgtttcaccgactagtaaaacaggttcagtcatctgtatacaaacagaaatctgttccattagtcttaaagaatgattcgtaaatgcgaacaatgtgctgttcattgattttttttgtatatttagcttttccttaagtaatacggctcttccaattttaatgctatcatcaaggttttccaaagtgggcacatgttgggtcaaaaataacgaaatccttgaggaagcaatgtctaatgactcgccgattgcttgtataataggttccaaagctttgaattctccaatagcgccagcgaaacagtcggcggcttcggagaaaatactgtcgtagacagaagactggattagttggtcaggtttgttgatgccattgtttttgaataggatgtctaacctttcgcacagcttaattaaatctcttacagatacaactcttgtgtgtgcccccttgttcaatgaaatgaacttggtgttcatataaatacttttgacgtttttgtatgaatcgattagtttggggataaggttggtcaaaatgggaaacttttgggctaaaatgtgtgtcaaatcctcttcgctaggttcctctaattcaataacattccagattctcataccaatcatattcaagttatagatcttattggaactatccttctgatgatcttcgtttattctaacagttgatattaactggaaaccatttgcagcctttacagtctctcctctggatggaatggttagttcgcgcttttctaaaagcgataaaagtattgataaaacatctgtaggagctttatctatgtcttctataagtacccatctcccttctttgaccgcggtagcgagaacaccagctctccattcaaacgtgcctggcttgtcaccagaggtataagtaccaatcagtaacttggcatcagtttgttcacctaaatgaattttcacaatggagtcatggcaacccatatatttacttagctcattgattaaaaaggttttaccggatcccgcttttccaatgagcattattggagttgaattttgaatctttctcccgagttgacgaagagaggaaaccgttttatgagtagggacaaaggttaatgggtagaatactttgtcgtggatagtgtggaccttagggacgataacgccacagattgacgcgaccttagtactcaaatcctgaggctcaataatgaagtagctagattttttttctatagtgaaacattctggaacactgggtagtttagagaaatttgcacatctcttagcttcgttcagttcgaggaagctgtaatcaattccagaatcgccctcaaaatggcccaacaatgaatcgcgtgattttatataagtgtcgagcatatcgtttaatgttttttctcccatgtctaagtataaagataaaacctttaatgctagaaatataacaacctgattttcttgttctttggtgagtaaatccacaagttggtataaaatgtcgggttgaatgaagcgtgcaaatacttctttattgtgatatagtaacctatagtatgctaatagtattttaaacatgtcggaatccttttgtgtggatggattttgaagaatagtgatgaaatgatcattctctttatctaaatagtcttcaattaatggcattgcaacgggaaatattgtaattatacttgccaacttttcaattacaagaacgtaatctttttttttggagtcctttatccaacgtgccactatctctaaaaaaatatgtttgtaaaggaaaacatgaccagtgatggaacggctatgtagtatagttcctgctaaattgtctaaattctcagaagttgattccttgttgctaaagtggaagggcgcttcaatagcatcagagggaaaagcagaattgaagagaattaacctttggttaactacgtctaaatctaacaaaattctatcctgggacattctcagcagattataacggttttaaaaataatgtgaccgcgtaaagtagaggtaccttaaaataataagagtagaattcgatgtcaaattaactcagaggtactttgaatctttaaaataatcactttggagaggaatgtctaaagtaaagcagtaagtgatataatgttttcttttcataaagctaaatagaccttagctcatcgcttctttaaaatttttcactcgaaaaagaaaaaatacctcgtaaagggcgacaataaatgatgagtagaaaaagaaatggaataacggttcaagtgcatttaaaatcaatgccttgaatatgtgtttcagtatacattcagtttgactatatatcaagagaaagctttagtatgggaagtttgttgagaccggttgatctggtaaatcaaccgcttggattccaagaaagatataaaattttgcagaaattattcaagcagctacaaaaggcatatgcacacacaaaaggaactaatattgaccttgaaagacttgccactcgcttagaagtccatgttgctaaaaacagcttgtctggtcagagttacaagtttaacatgagcattttactgcgggatgtgcttaaatataaaggagatctctcgaagatcaaaattaatgggcgcccccttaaaggagctaagcctcatttatcctcaattggtaatgcaaactctatcactacaaaatcaaaagcgatggaagctttaaaggctctgattttggattcgaaggtcttagagaaaaatgggtatattgttaaggaaatgcaaaataaaactaatgatgacaatagtacgcaactgtatgcaccttgtttgcgttgcagctcaaatttcaaaaaaacagacatcatggaaaagactctatgtaggtatcaccctttgaaaagaatatacaacagagataccaagaaccatcagtatccatgctgtggtgaaactactgattccgtttcttttctaaggctaggatgcaagacgttttttcaccatgtgtttagaggagaatcatatgacgagttatgcaaaatttcgaagttttctagtacagatgacattgatggtgttgagaatgttctttctcttgactgtgaaatggcttttacatcattgggctatgagatgatacgtttaacaattgtggattttttcaccggcaagacactatttgatcatgtaattcagccaataggggatattgtcgatctgaattcagacttcagtggtgtccatgagattgaccgaaccaattgcccgacgtacaaggaggcacttgatgtttttttatccgaaaacttaataaataaaaatagtattcttatagggcacggactagagaacgatctgaacgtcatgaggctatttcataataaggttatagatactgcaatactttattcaagaacaaagtttaaggtttctttgaagaacttagcgtttgaagttttgagtagaaaaatccaaaatggcgagcatgatagttctcaagatgcaatagcaacgatggacgttgttaaagtcaaaataggtatttctccaagtcaaaacaagtgggaaaaataatgtgatcatattcaaagttgagcagacatatatagttattacatttcatacggttcacatgagttttattaagtaattacgttaagaaacaacatgataaaagtaatgatttcgtattgctttcctattttctgtatttaagcgaacaataataatgcaccttttcaatatctgaatattaaaatatcgtgaaattgggttcaggatgtaccaaacttgatgatagctgaagcaccataatcctatttaaagaagtacctgttatccgtcagtaattaccagaacaagttaattttaagtttaatctaaaaaagtattgcatgcggcattaaaagacaacataaaacatctaaacggtaaagtatgatcgataattctccataatagttctgttatttataatctccagcactaataaatgctatacgtatatttgtacacaatataatttcagaatttatattgctaccatgactgtctgagaattgggggaataacttgataattgttgggattccattgttcgtaaacgcaataatattaggtatatagaagatactaaatgttctctccgaggatataggaatgctcacaatggaatcgatatatttctacataatagtattgagattattcctcttttagttttatataattcattatcctattacattatcaatccttgcatttcagcttccattagacttaatgactgtttctcaatttttatgtcatcttcctggacctcatgtgatactataccagtagcatgaatactactgaatcgatgatactttagagtttcattgcaacagtttcaacacagcctggcatgaacagtggtaaaagtatttcgtccactattttcggctactataaataaatgtttttttcgcaactatgtgttcgcgaagtaacccttcgtggacatttggtcaatttgaaacaatacagagatgatcagcagttcccctgcataaggatgaaccgttttacaaagagatttatttcgttttttttttatcatcgagtgaagtatcgtgacttgtacatttgaagatacccagcgtacagcagtgtatctttatcttcctgtatgatatagataactaacatctcgaatagaaaattgtctcgcgttcgaacctaagcctttgctatcggttgaacatagaagaccgcgtgattcattttagtgcgtaagaatgctattagtacttatgtgctttatgaatgtgaatattgttacagctatgcaatggtacgatcatactctgaacgatccatttaaattatatatgtcaaacagaagagaaaggtttttttattgaagatttcacagaaaatcaatcattttgcaatattccttcgtcccagagaaggtttcggcttttacagcaacgagaatgattcttccattatttgtacctagcttccacatggatttcgataagtgtagtttcaaaccatgaacgcaattcaaaactttcaaattggtgcaatccaagaccctccctttacatttggagtcgttaactaatgagaaaatattacagcattttgcgccatttaccgtcaagtcacaaatggagacacatgcaggaataattaagtgggattcaacttgcatttgactgtcacgaagtttgaccttatattcggacagatcaattttaaaatctgggttttccaataaaacatccgagaacttgttttcaaacaacactgcagcctctctggataggtctacatgaacagtcttattctttttgttgaatattattttgcactggttagagtgtaattggaaaataagatcgtgcgaaactgtatcgatataaggcctttggtattttaacatgctccagtgtctttcaatacaatgttttaccttttttgttggaggttcatattcatcattgttgcctgaatcagtctcggttttatgaaatccagtagcggctttttcaccctcagttccattgagacaactgcttaccgctaaagattggtttccggtatgaagtgatgttaacctttcaatggttacacccttcttggagacgctatcaagagctatgcaaacttcttgacaattagttaagggattatatataatttttgcccgcactaattcctgctccaacctgttgagacggtaataacgacactcttttatcagagatgcggttctttcctcagacagttctaatttggaaccgcccagtaaagataatatatctcggaaaaattctggggaccttgcaatatatgagggtggtaataaaggtggaaagcccggcttcttatttgactcccacttctcaatttcctcataagatatgcgagaaatcgtttcaaaatagttcaaccggttcccttcttcatggaataatgattttggtaccttaaagggaacacctccaatattagtgaagtggtagtcgtattcttttatgagtttaactaacttgggtaactgaaaatataatgcgtccgcgaaaagacaggtaaattgtacttcgttcttaatatcgggaaaataaccttgtaaatgtctgtatattatgatgaacacgtcttccgatctatcaacaaatagaatcgtatttttatcgtgcgtattgaagaattgggtgaaaaaattgggcgcatccgaattcaatgtagcacctgagatctcaaatagcttttggccaatcctaatcttgaaaacttcatggtttggtaaaagctcgggggtagtttctaactcttttgtataaaccacgatctcgcccttttggccagacatctgatatgagcgtgcgtgtgagtgactttacacttgtctatccacgtcctgaagttgttcgtgttctttggatattcgtgttcaagctaataatgagcctttaaggtaatacaatttataaaccaccaccttggcctcgatctattgcgcttatgttgtctattagtaatcaagaaaagaaccctaaatcatcggcgtcccctgtggggctctcggaaaaaccggtcctgacgtcactgaaaagatttcggcacatggtcatgggaccagagaaaaattaatccgacatgtggaatatttccttccgttaaggtagtgagcgcggattttttctgatttgtaattatacggggagctctggccaaaaaggtcagtatttggtgatgaagttgaatatcatcttttgattttcttctgtatcattctttttctttttccacaccccttccggacggtattcacatattgttgagaggttaaatgaaaaataaaggggtggaaaattaaggacgagatgtaagggaaaagcataaacgaaacattatataaaggagcacaatttcctctcccttgccaattgtgcatataccgtttctttataacgaaatttcaacaaaccagaacaacacaagtactaccaataaccacaacaaaacatgtctgacttagttaacaagaaattcccagctggcgactacaaattccaatacattgctatcagccaaagtgatgctgacagtgaatcttgtaagatgccacaaacagttgaatggtccaaattaatttctgaaaacaagaaggttatcattaccggtgctccagctgctttctccccaacctgtactgtcagccatattccaggttacatcaactacttggatgaattagttaaggaaaaggaagttgaccaagtgatcgttgttactgttgacaacccgttcgctaaccaagcgtgggctaagagtttaggtgttaaggacaccacacacatcaagtttgcctccgacccaggctgtgctttcaccaaatccattggtttcgaattagccgtcggtgacggtgtttactggagtggtagatgggccatggttgttgaaaacggtatcgttacttacgctgccaaggaaaccaacccaggtaccgatgtgaccgtttcctcagtcgaaagtgtcttggctcatttgtagatgctatgtaatagacaataaaaccatgtttatataaaaaaaattcaaaatagaaaacgattctgtacaaggagtattttttttttgttctagtgtgtttatattatccttggctaagaggcactgcgtatacttcaaggtacccctgtgttttgaaaaaaaacaacagtaaaataggaactccgcgaggttcaggaacctgaaacaaaatcaataaaaacattatatgcgtttcgaacaaaattaaagaaaaagaataaatatagattaaaaaaaaaaagaagaaattaaaagaatttctactaaatcccaattgttatatatttgttaaatgccaaaaaagtttataaaaaatttagaatgtataaataataataaactaagtttacaacaacaaagcagcggcaccagccaacaaagcaccagcagctggcaaagccttagcagcagcaccagtgtaagaggtgacagagtgagttggagcagcagaggtggtgttctttggagcttcagtagaggtaactggagcagcagtagaagtaccgttctttggggcttcagtggtcaatgggcaccaggtggtgtattgagtgataacgtcatcgacggtgacggtagcggtggaaaccaaagctggggagacagtttcagaacagacgtggtcttcacaagaagtgatggtgaccaaagtggtagattcttggctgacagtagcagtggtaacgttagcagcggcagaagcgacagcggcgacagcggcgatagaagcgacagtagaaaattgcattattgatatagtgtttaagcgaatgacagaagattaatttcttggtatgttaggaaagaataaaggagaataagaataattagaacaatgtaggatggaaagaaagattatcaagcatgccgactttatatacttgaacggaggcaaaggatgcaaaattttctcacatttctttctgccgttatgttggaagtaagactcccattatcgcaatactgcaacacgaatatgcaaaatttgctgagttatcgcagatagttgttgcaaagatagcggcgtaggtggccgcgaaatggggaattccaaaacaaacggtttttttactcctgagaaatacttgtacgggataatccagggcctaccacccacgcttcgaggattggcttttatttttttttttttggtggcgttttatttctttcccgctttctgggacttgtgcggagttttgagaggggcgcgcggcaaaggattcccaaaacggaaatcagacgccaatagccagcactcaaagcagttctggacccattccgattttcccatttggttcttgcgcgtgctgattccgacacgcgcgtctataaatagcatgaagtatccgcacaccgcagcgttagtgaggtgagggtggcagcaagctaattcccgcatctggaatctgaactgccccttttggactaaccgtgtggttcatgggtgggcgaagtgcgcaacctcgaaggttttcttttgcgtgtcggattttacatccggcggtagcgcatgatgccatggctggctccagatacatcctcagggcaccagcatctataattagattggcgcaacatggctggctgcactgctgtcttcacttctttctttttccggcaatgaatgatgtatgttttgtggcaaaagggtccgcattgtacctgtttacagttgagattatcgtttttggtagcccttcattacggcataacgtattaagtttcttttattttgctttgccctggtttaaaagacaatgtcgattaaaagttaattttaatcgattgaaggaaataagaggaatagcgcaagttgttaggaaagcgttctttatctccaagactttgccctgtatataattaaacacctcaaagcgcttcgtcatggatggagattattcggcattttgacatacaggagtgccacatgcgaaagcggagtgggcgtattctctggttaccctacatggtctggcggcgttattatacgggaggatcttcgaagggaaggaaggaaaaaaaaaaagaaaaggccaacgaaaagcaaatattatctatcgtcgaaattatcatactatcttacaataagagtagtaattactttcttgtttgtatagtggaagaggaatttgcgataataatagcaaaagtaactaatctctaacaagaaaccttatttattttctctttcttctatattggtaaatactagactcgaaaaaaaggaacaaagggaaaacagggaaaactacaactatcgtatataataatgaccactaacgaggaattcattaggacacagatattcggtacagttttcgagatcacaaatagatacaatgatttaaaccccgttgggatgggggcatttgggttggtttgctcagccacggacactttgacatctcagccagttgccattaagaaaatcatgaaacctttttccactgcagtgctggccaaaaggacatatcgtgaactaaaactactaaaacatctaagacacgagaacttgatttgccttcaggacatatttctttctccattggaagatatatattttgtcacggaattacaaggaacagatttacatagactcttgcaaacaagacccttggaaaagcaatttgttcagtatttcctataccaaattctaaggggtttaaaatacgttcactccgcgggcgtcattcatagagatttgaaaccgagcaacattctgattaatgaaaactgtgatttgaagatttgcgatttcggtctagcaagaattcaagaccctcaaatgacaggctatgtttccactagatactacagggcacctgaaatcatgctaacgtggcaaaaatatgacgtcgaggtcgacatttggtccgctggttgtatttttgccgaaatgattgaaggtaagcctttgttccctgggaaagatcatgttcaccaattttcgatcatcactgacttgttgggatctccgccaaaggatgtgataaatactatttgttccgaaaatactctaaaatttgttacttcgttaccacacagagatccaattccattttctgaaagatttaaaacagtcgaacctgatgccgtagaccttttggaaaaaatgctggtttttgatcctaagaagagaatcactgcggcggatgccttggctcatccttattcggctccttaccacgatccaacggatgaaccagtagccgatgccaagttcgattggcactttaatgacgctgatctgcctgtcgatacctggcgtgttatgatgtactcagaaatcctagacttccataagattggtggcagtgatggacagattgatatatctgccacgtttgatgaccaagttgctgcagccaccgctgccgcggcgcaggcacaggctcaggctcaggctcaagttcagttaaacatggctgcgcattcgcataatggcgctggcactactggaaatgatcactcagatatagctggtggaaacaaagtcagcgatcatgtagctgcaaatgacaccattacggactacggtaaccaggccatacagtacgctaatgagttccaacagtaaacgtgtttttttaatgtccctaaccactcattcttacttctttttgatgtttcttttttttatggtactcataaaagtatttacgtatatagttgtatagaggaaacaaaaaaaaaaagataaaactcaattacaaagtaaagtggacgtatttcgatcatgatttttttctgttttaaccgcattggattttcttgtaaaactggaagaaaaaggaaactaaaaagtcaagaaagacctttttaagactccaagaaccgtcacttatggcgtattgtttgtttatcagcacttctatcttcgataaaggtttgtctgtcttatattgtttacatttcaagtctaattctgtgcttttaccgaagaggaattttcataaatacggagaaaatataaaaaaaaagtaaatacagaaaatagaacagttgaagcagaaaaagagaacttgctaaatagctgtctcacccagacaagcgtatacttaccacatttagtcttttgcaatctcattcttgttgaagataactattacattcacggactgtggcagaaacttctccttaagaaattaggaactcataaaaggaatcagcagctctatgtaatatcaaaatcttttctattttttgtatttatgctctcattcattaattctaacggagctatttattataaacagtgaagatataaaccatatgtctaatagaacaaatttcaaaaagtcttcaatttcgtggatgtgggaatgcatttattaaaaataatgaatggcaacatacgacaccaaaataggaacactttcagtactatacagaactacggatcttagtttattgagttttgagaaataggttgatatggagacaatttcttagcgttattagaggttataagtatacagaataacctacgagtagtcctcaagaagataagactctgcaaaaggtatcaataattttacttaatcatagcactatttcttctttcgctttgtacagcagctcatatattccattacattatcaattcttacatcgtagcataaaacactaagattcaaaaatagaaaactgttgtatctcaaaatgagatacgtcagtatgacaatacgtcatcctaaacgttcataaaacacatatgaaacaaccttataacaaaacgaacaacatgagacaaaacccgtccttccctagctgaactacccaaaagtataaatgcctgaacaattagtttagatccgagattccgcgcttccaccacttagtatgattcatattttatataatatataagataagtaacatccgtgagttaatctgataaaccgttttgacaactggtaacttccctaagactgtttatattaggattgtcaagacactccggtattactcgagcccgtaataaaacaaaaacaataaatcttgttcctcgtggcccaatggtcacggcgtctggctacgaaccagaagattccaggttcaagtcctggcggggaagatttttttgctccgacaattatgtcgctacccttcagttttgttgaaaatgatgcttttatcgttaactttacttatctttattgtttgcaagattactattaatattaaagagggtctagcaaggatactgcgattgtttctaaatatttcaactttctacgttattcatctttaggaagctaaaaagcattcaaaagattactatgaagttaatctttaaacatagtttgatgagcgtctatgcaaatagaataacttcaaaaaattttctattccatttttggaaagccccaaaaagctatattctataatttctgaatcttattgtgcttgtggaggtcaccccagttttctataaattattattcagctattatcccaatacgactaaaggtattgagattcacggatattttttcccctgcaactttcacaactggagggctctgtttcttgattttctttttgtcatataaacatatcttagcgcgattgctaacaaatagtatagatatcataatttttcctcatcctgcacacaattacctatagcagcgtcattcgcaccgccctcctcattggattttttaactgtatttctcgttttagatgagtcttcaacatttctatcgttttcataaatatcagttttactgtcggaatttttattgctctcaggaccaccttcaatatctttatctgcaacggtttcgtcctcattaaaattttctgcattaccctcaaaattctgttcattttctttatcatgatcagtgttaatgttcgtaacgtctgtaaaaccattgctaaaatcttgactgtcttccttatcgccattttcatcgccctcaccgtcatcgccattttcatcgccctcaccgtcatcgccattttcatcgccctcaccgtcatcgtcatcgtcatcgtcctcactatcatcgtcatcaccaccatcatcatcatcatcctcagagtcctcatcagtatcatcatcttcattgtcctcactatttcccacctcttcactttgttgatctgtctccgcatcaggtttataatgtaaacccaagcccatcatagctttctgtatcgcgttcgatgttttacttctgtttttgagatcttctgtggattcagtaacatcttcattagcagtattctttggtttattgaaatattccttccatgaattccataagttggctgctggcttgtctgtattctttccaggatttacagaaatttgggaaacagacttttttgactcgatgctttcctggtctttgatatcctcctcgctttgatgaccatttttattgcttgaagagttgctagagcttctttttaaattatgaaatgtggccaaaaatcgttgctgtaatagagacagagtgtcggcaccgttatatatatgcttcggaggaaacaagtcgaacaatctatcatctgttcttgagttgaatatcagaaaattttgagtctctttccaactctgaacccaattcaaattgaataaatgaacgggattggaatttagcatatcctcaggtatagtcttcaaagcttgatcattctctttatgcaggtccaaataatcacttaatttaacactggaaagtaaccccgttaaatagtcctcgaattgccacctaatgaaatcctcactgccttcaaattgagagttttttggagtttcatcatcattttcgttccatgtgtctgatacaattccagatatagattcaatccattttttatcatgacttgacaattggaggacggggttcaaagtcttgtccagaatatctacagtggaattgtctgtattgacaaatatgtggcacagttcctccttttgttcagcaagcaatgtgttggaacttccaatcataaaaaacaaagtacgttctgaccgtatgtcattcatttgctgcagtggagtatagggtgaaaatagtccacctttttcgaaaatcggtaatggaaaacctaagaatctcaacactgattctcgattgcttgatttaaacgagtccacaacatttaatttcgaaatatcctgaaacaactgaggactgccagaatcctgcaaatttgacatcaagtccggaattaagctgatcagaccgaactgtaaattacacaaagcttccacgtcgttgccgtaaactataatttttttttcaagcataattgctttcaataagactaaagcgtttctcttaaaatcatgtagtatctttctcagacataacccaatataaagacgattttcggcatttctgaccaatgatgcaggcgtgtaaatcgacttcaggttttcgtataaagactggattatcttcctgtccccaaaatcatgctgcaagaaaaaagcattagtcacaatactaagtttgtccttgatttgaccgaagattggttgccttgagatgactacaattgccttctgtacagtagatcgtgttacatccttatctttagtgaccaattcatcactctttatctgtctcgagcaagatatggcaaacaaagtcgtgttgtcattgatgctatcatcactcagatcagttgccccgttgggagggctcctttgtcttctttcatcatatagtaatgtgaaataagtaaatgtttcttcaaacgagtgagaaccatcaggaagggcctggaagggtaaatttggccatagttctgcactttgggtgccctcaggtaagccataccagtattctatttcagggcctcttttgtgatgaaagtccacaaggcagataccgaagatgactgcttcctcgtgttcatccattattttgacaacaaggttgcagcgaggcagaatgtatatgttagtttgatatggtcttcctgcttggattcctttaaggcttcaaaattttcttgaaaaggaaacttcgtgaatgagctgtaaggatgcttgatcgggccgtacattcttatgcaagatccattattgactgctctctgttgggttagcttccatatcttccgttacccgttcgtataatcattacccgacggacaagcatcatttcagcggctatttttgctaggcaaacctcctaagcaatgatacttctcaaacgttcaatggaagtaatagaagttcaacttaccccattaataatccacacattagaaggttgggacaataaaaataaaaagcattaattagtgtaaactttgctcccaaatgcaagtctaaggtaagttctttggttcatggagtttttgcagtgtaatctcacgtgcactagactgagtaaagcgaacctgagttcaagaaataatgattcacctatgacatatagtccaactatacaagcaatgaacccttacggattgaagtcattcaatgttcaatgtttgttgtaataagaaatattactagaaaaagattttttctttcggcggcgttttcccgcttttcttaaacaatctgcagttttaacatcgaattcacgaatatttgttcgctaaagaaataacacagaagatgaaatgaagaacatacattgagggcgacgaatatatatgacttataaatacaattgctgtgatgatggatcaggaaccaccgttggttcagtggtacgatttgataacgtcaccttgttaatcgatcccggttggaatccatctaaagtatcgtatgagcaatgcatcaagtactgggaaaaagtgataccggaaattgatgtaataatactatcacaaccaacaattgaatgtttaggtgctcattcccttctgtactataattttacctcgcatttcatatccagaattcaagtttacgcaactcttcctgttatcaacttagggagagtttccaccatagattcatatgcatctgcaggtgttataggtccatatgacacaaataaactcgatcttgaagatattgagatatcttttgatcatattgtacctttgaagtactcgcaattggtagatctacgatcaagatacgatggattgactttactggcgtacaatgctggtgtgtgtccaggtggttctatttggtgcattagcacatactcagagaaattggtttatgcaaagcgatggaaccacactagagataacatactaaatgctgcttctatattggacgccactggtaagcccttatcaactttgatgaggccctctgcaataattactactttggacaggtttggctcctctcaaccgtttaaaaaacgttcaaaaatctttaaagatacattaaagaaaggtttgagttcggatgggtccgttataataccggtagatatgagtggcaaatttctggacctgttcacacaagttcatgagttattatttgaaagcacaaagatcaatgcgcacacacaagtacctgtacttattctgtcttacgcgagaggaagaactctaacatatgccaaatcaatgctcgagtggctgtccccttcactacttaagacatgggaaaacagaaataatacttctccatttgaaattggatcacggatcaaaatcatcgcaccaaacgaattgagtaaatatcctggttcaaagatttgcttcgtatctgaggtaggagctttgattaatgaagtgataattaaagttggtaattctgagaagacaaccttgattttgaccaagccgagctttgaatgtgcgtcgtctttagacaagatactagaaattgttgaacaagatgaaagaaattggaaaacatttcctgaagatggtaaatcattcctctgcgataattacatttcaatagacaccataaaagaagaacccttgagtaaagaggaaacagaggcgtttaaagtacagcttaaagaaaagaaaagggacagaaataagaaaattctactggtgaaaagagagtctaagaaactggctaacggcaacgcaatcatagatgataccaacggagagagggcaatgagaaatcaagacattttagtggaaaacgtcaatggagtaccaccgattgatcatattatggggggtgacgaagatgatgatgaagaggaagaaaacgacaatttgttgaatttactcaaggataactctgagaaatcagcagcgaaaaaaaatacggaagttcctgtagacattataattcaaccaagtgccgcttcaaaacataaaatgttcccatttaaccccgctaaaatcaagaaagatgattatggtactgttgtagattttacgatgtttttacctgatgattctgacaatgttaatcaaaatagcaggaaaagacctctcaaagacggtgctaaaaccacgagccctgtaaacgaagaagataacaaaaatgaagaagaagatggttataatatgagtgatccaattagcaaaaggagcaaacaccgtgcttctcgttactcgggattttctggaaccggagaagcagaaaattttgataaccttgactatttaaagatagacaaaacgctctccaaaagaacaatctcaactgtaaatgtccaattgaaatgctccgtagtaatcctaaatttacagagtttagttgatcaaaggtctgcatctattatatggccatcgctaaaatctagaaaaatagttctttccgcccccaaacagattcaaaatgaagaaattacggcaaaacttatcaagaaaaatattgaagtggtcaacatgccattaaataagatagtggaattcagtacaacaataaagaccctggatatctccattgactccaacctcgataaccttttgaaatggcaacgtatcagtgatagttatacagttgccactgtcgttggcaggctggttaaggagagcctaccgcaagtgaacaatcatcaaaaaacagcgtcaaggagtaaactagtcttgaaaccattacacggttcatctaggagccataaaacaggtgcgttgtcaatcggtgacgttaggttagcacaattaaagaaacttctcacagagaaaaactacattgcagaatttaaaggggaaggtacacttgtcataaatgaaaaagtagcagtccgcaaaatcaatgatgcagaaactattatcgatggtacgccttccgaactttttgatactgtcaaaaaattggttacggatatgttagcaaaaatctagccttcttgtatacagcacaaataaaaggttcaatttacgttcgtggactgcccacaaaacagtatgtgacataaattgctgtgtatctcgcaccgctattatctgtatataacattctaactcacttttaacgatattagcattattgatttctttctttttctgctgaatttcaccaagcggaaattttcaaagcagaattttttccctaatttgctacaagtgctattctatcccacaataaaaggaaattgttgatgagttttagaaggattaactctagatactttgaaaatagaaaaggaagcagtatggaagaaaaaaaagcaaaggttcctccaaacgtcaacctttcgttatggagaaagaacacggtagaaagcgatgtccatcgattcaattctcttccatcaaaaattagtggggccctaactagggaacaaatatactcctatcaagtcatgtttaggattcaagaaattaccatcaaactgcgtacgaacgattttgtgcccccctccaggaaaaataggtcaccttctccgccaccagtttatgatgcccaaggtaaaagaacgaatacccgtgagcagaggtatagaaagaaactagaggatgaacgtattaaacttgttgagatagccctaaagaccatcccttacttcgttcctccggatgattacaagagacctaccaaatttcaggacaagtattatatcccggtggatcagtatcctgatgtcaattttgttggtttattattaggtcctcgtggacgtacgttaagaaagctgcaagaagattcgaattgtaagattgcaattagaggaagaggttcagtcaaagaaggtaagaatgcaagtgacttacctccaggcgccatgaactttgaggaccccttgcactgtttaattatcgcagactcggaagacaagatccaaaaaggtataaaagtttgtcaaaacattgttatcaaagcggtgacatctccggaaggccagaatgacttgaaacgaggacaactgagagaattggcggaacttaatggtactttaagagaagataacaggccctgtccaatctgtggtttaaaagatcataaaaggtacgattgtccaaacagaaaaatcccaaatatacagggcattgtttgcaaaatatgtggacaaactggacatttcagtagagactgtaactcatcgtctcaaagaatgagccgttttgacagaaacgccacggtaaataattctgcgccaatacagagcaatgacgtacactataatagcaatactcatccaattcaagcaccaaaaagatctcgttatgacaataactcgacggaacctcctttaaaatttccggcttcttcacgttatgcaccatcaccttcacctcctgcgtcacatatttcgaggcaagctcaaaacgtgacgcctacaccccctcccggcctaacatcaagtagctttagttccggagttccaggaatcgcccctcccccattacaaagccctccagagtcggaacaaccgaaattttcgctacctccacctcccggtatgactacggtacaatcctcaattgcacctcctcctggcctaagcggtcctccagggttttctaataacatgggcaatgacattaacaaacctacacctccgggactgcaagggcctcccggattataatacactcccattatacaatatctgcatttttttttatttgtgttgaaggtatgtagtctctattttgcatagttcctttttttgttggttttttgccttcctggttattattaacttttgatatttaatttacttactagcttattctactactgtttagtttctacggcctgaactacaatgacaaaaatattatttcacgatacccttacctttattcaaagtgcctgttcctgtttccattttttggctagttccaagaactttgatggttttggcttgtcatcatcgatatcatcaggaaaaatgtaatccacgaattcttcttccacaccgttctgtaacctcacttttttgattactttagggaatcttttcttgacggtttcttgatcgagttcagtaccgtaagtttcttcatagtcttttagcgcttccaaaatagacagtctcccttgtttatcatccttctccttgaaaaaaactatcgcctcttcaaaaacttttcttgcctccaatttattctcatcggtaatttcaaactctatgtcttcatccacattttcgctttgcagttttgctaaatctaatagttgttgctccgtcggggttgaagtttgatacatggcgaattcgatccagctttggggggaatattggttgagctccaaatatcttctataaagcttccttgccttttcaaattcttgtgattctgtctcaaatgttatgtatttttgaagtaatacaattttagcctcctttgttaagaaatcagaattttcatctagtgcaattgtatatatacctcttactctatcccaatctcctaaattttcttctagttctccatattgtgaccaaatttgtagatcagagggctgaaattcaataaatttctcatatatttttctcacacgatcaaattccttcaacttcacttccaactcgatatatcctttgaaagttttagccttaggacataaaccgattgctttacccaaaatttttctcgccttcggtacatcatcatgtcgtatcagaaatttagcatacattagccatattttggaaaaagtgaaatgtttatgagggatgatgtcgtcaattaacctctgaaaaagttcttcttctaaaagcgaattttccaattctaactcaacatagcatatatatctcatccacagataaatataccttttccactgaacattttttgatagttcttttggtcggctgtccacaatagctttctcgaaagtttgcattatttgtttggggaaactttctgaaatgagatccaagtacagccaccaggtgtcataatcataggcgttattactcaatattgtttcatactccattttccttttatagctaatagtttcttctattgagtttatgtcaccaaactgcttttcaaaatccaacagtcctgccttgagcaattgattggagggccatttttctatagcaatttgataaagagcactagatctttcgtattcttgctgcgcagcttcccaatgagcaaatgaatttactaattttgcaacctccatatcagaccaaatctgtaaattttggaggttagctactgtgtctatcgctaaagaatacacacttctcgtaaattcagtattaccatgtctattttcaaacctcacccactttagccatgtctgcatttgcgggtgagccatgacgtattttgagtaaatctctcttacaccgttccagtttttctgtcttatttcaaaatccacgaaagaattccatgcattaacccctggctccaaggagcaccatttggtgtacagtgatcgtacaatttcaacgttgtttaacgactcttcgacaatgagatacttgtaccataacttgtctactctgggcaacgtactaatagctctgttcataagattcctagcatggttaatacatttgactttcagctcagcatcaatgtatcgtatccaaagggggatgaatgaactatctactaataatgctctttcaaagatagatctggcgcgcctcatgtcgtgttgttcgatttcgaattgcgcataacgaatccattgtcccatatccagtcggtttctcttcaaataaccctcatattctgttctcttccttcgttgatactctcgaagttcctccaagtctaatatatcaatattagtcgatcctcttgctttttgccccttcttgtacacatcccgcagaatctgctccgcagaaacatgcgtatcaacggctgttggctctaaagtgtccatgctggcaatagtagagtacttttagctcaagtttgtctatctattatgaacttgcataatcaatgagtctcatcaccccaactatttggcaccaaggtttttaattttctatcgcgtcttacggatgtatataaattatttaaccaagtataatagcggttaaattgaactcgcaatattaggaaaagagctatgatgataagctcttcttgataaatgaagccaagtcttctaattcatctggaactgtagaatgggccatacctttgtatactttaaattcataattttgtatctcacagctatcttgatagaactgttttgcctttatacctagtccaataggaactactggatccatgtcaccatgcccatgaaaaattggtgtctttacattaatgccattcttatgttgtttcagaattcctgggatggaacaaaatcccgacagagctactataccaccgattttccatggtaaagtaactgatgttgcgagagctaatgcggcaccctgagagaaacctccgataataatctgctccggtttaattcctttatcaatttcttgcttaaccgtcttttctatggaattcaaagaattcataaaaccgtcactgtcaactttggaaaaactaggatcccattccaagatgtcaaaccaagcaggcatcaatgcaccgccgtttgctgtcacatgaagctctggagcattaggaaaaacaaaattagtatgctggaaagcggcagggtctctctgttgtaaatactgagctaaaaatccccatcccgaacctgtatcacctaatccatgcaagaatatgatagtttggcgtgctggctgaatttttgctgcaactctaagtccattcatattcgatagcgctcaaatgggcaaatatagtgtatgtgttcttattttcgttctcttttgctaacatttttatttcatacagaagccatttttccctagaataggcgttctgaaaagaaggaaatatgaaagtaaaggctacaaaactaaggataaaacaacgaaggaaaaataaggggctcaatataagcagattagatattatcagagcagaaatggatgtggtaccatctccgggtttaccagaaaaagtaaacgaaaaaagcaaaaatattcccttacctgaaggaattaaccttttatcatcaaaggagataatcgatctaattcaaacccacagacaccaattagagttatacgtcacaaaattcaatcccttaacggactttgctggaaagattcatgcattcagagatcaatttaaacaattggaagaaaattttgaagatttacatgagcaaaaagataaggtccaagccttattagaaaactgtaggattttagaatccaaatatgtagctagctggcaagattaccattccgaattttcaaaaaaatatggtgacatagcattaaaaaagaaattagaacaaaacacaaagaaacttgatgaggagagttcacagctagaaactaccacaaggtccattgactcagccgatgacctggatcagttcatcaaaaattatctggacatacgaacacaatatcacttgaggagagagaaactggcgacctgggataaacaaggtaatttgaaatactagttcagcagctaccgccattatcaatatgtacgtatatagactatactttatagattattctagatgccaaacgaattattagaatattaaagcctttgattataggccatatcccaggtaaatagtatactaggaatgagaaaaaaaaatgtgaataaatggtaacctattcttagtgggtaagataaactattgtgaagtaaaaatgaagaccgccaacgtaacaataaaaaattaataataaaaaaaaactttgcccaagcgagagcaacgatttccgccagaaactccaactggcttggagatgtgaatgtctaaactttgtgcaacggttttcagatgaatgcaaaaagaagagaaattaatgtgaggggtaaagatggaactatatgatcaccaacatttcttttacttgatgtagaagtggcggatgcagtactggtcgtcaggttaccgctaaaggaagcagtttgtgaggaatttacagtaaatatgttaccaccggtaacaatagatgcacttgtggaccaagtgtttgtatagcctggtgcctttacggcgcttggaacagaggatgtaataatttcgatattttcgcttgtggtattatagcgagcttgtgccatggatatttcaagattctccaaatcataaaccacgtacgcgttagtcaaaaatgaatcacccaaaatggtacctgtgtcatcactcgttgggataatacctaaaagacatgtagtgccagtactcaagataaaactcgaaagtggtgcattgatgtgaaaaccaccaaaatcgaacactatttccatactatcatcagatggacagtccaatacgtaataccctatcctggaagagtattgcgcacctagttcagtagcgatcatacttaccactgtttgaggtaaataagtcaaagtagtaccggaatccaacaaagcaggtattttagtggtagtcaaggtcttgttactactcccagaatcactaataccgataccattaatagtgacatcaaattgaatgggagagctaaatccactagcactcagagtgtttacgatggggattgtgtataaggtgccggtatatttactgtggtccacggctccgaacaaaatggtgccatgcatagcgtccgagtcgttcaaatacaaagaatatgtgttgcttttgatagcaccagaatttttcaatacaatggggaagttgtcgtatttataagcttttccactatgagacgcagtagagccagaataagtgacttctaattcgggcaaaccaatacctaacacacccatagtagaattcgtttcattggcaacggcaaaagacaacccggtaacgttcaagtcgcttaaatccaaaacatccgtaccaaaagtaccggaggcaaaagtcccatcaccgtagctaatactgaaataggtgttgtttgatctaaatgtagaagagcccgaagtggaaaatgtcccgtattgttgacagtccatggtggcttccgaagcaggcacggattgagttgccgtacctgaaccgcctcctaagcccgtagcagtggggccaatggcactgcccgttcccgtcaaccagccaaatgggtttatatcattaatcaaagatccgccgcttgacgaatcatcacgtttgtcaataacacgtctccggctactacccatactgttcgaagaacagtatggattatccgagcccataatccatagatcagaggagcctgtgtccaccaggaccgttacgttctgtggtggcgtgcccacttccaagtccaccgaatagaaactttgctggttggtaattataatttcttcataaccgtcagccctcttcaataggcgtacttccggttttttgtcgcttcccacattttctagcgagtccccgtaaagcttatgaaagggcaacttgacgaacttggaattcgagtcgtcgtcgcgcttgtttgctgctggtattatcttaccgagaacctgcgatgcaaagagtgacgaaaggaccgcagatcttacagttttcagtttcatatgtggtaggtaatattatactatatgcttggtgttcaccttatctttttattacgctatgtattttaatatacagaaaagccaattgcgttcttcttaataaccgtccaattgcggaaataggaacaaatgcaaaaagaaggaaaaaagtaaatcctctttgacacccttttcttaagtagtcggatttccctgtttctccataaataagtccacgaatttttttatgaaacctcaattttttcggacacatcagtgaaacgaaaactactcatggcgcagtataaaaggagcgaaaagccactcagttgagtggacgagggaggtgaggtggtgacagaaaagaggaggaaggaggcagtgctatgtgagggtgtcttggctgcatgcaaggtctgacgatctaattgacgcgtcagaacgtgtgttttaggaatattcttatttaagtatgcttttcctcttgaaatcgcgcaaagaaggaaaggaaaaagtgtctatatatagtgtctattgtttttttttacgaaaagaaaacggaaaggatgagtaaggaggggactagcagtaaacccaaggtagagcgtatactggaagcggagttggtagcagccctctggagtgccctcttgcttttatgagtcgactttgcagtagtggtagagtttgtcttcttggtggtggttgacctcgtagtggtggcagtactggtgccattgaaagtgcgcacggtggtaaaaatattaccaccggacgtggcggaggcgtagttagaccaagtgttgttgtaactgggggcccttattgcactgggaacggtagatttgatgacttcgacgttctctttccccgtgccatacttggcttgagctagggaaatctcgtagttatccaaatcgtagaccacgtaggcgtttctcaagaaggaatcaccaaggatagcggtggcgttgcccgcttgtggaattattgccaagacacaggtccccacactggtctgcatagtaaagtcggatagaggagcgttgatacggaagccaccgaagtcgaaggccacgctggttttgttgtcgctcgagggacacgtgtactcataataacccaatgtcttggaatacgaggcattcaagctctttgctagcaaagccactgcctgggagggcagatatgttagcgttgtgcctgaatcgagtagggctgggagcttggtggtggtcaatgtgatgttgcgcttgtcggtttgcagtcctaagccctgtaaagtgacatcgaacgccaccgggtgctgataaccctgcgacttataaagattaaccaacgggatagtgtacagttggccctcgtacttgctgtgatctacagcgccgaagaggatgctgccggaggactgtgactcgtcatttaggaaaagagagtatgcggttgcatcgatggctccagaatgttttaggaacaggggaaagttatcatactcgtagcttctcttgtccataatagcgacttttccagaataggtgacttcaagcgtggaaaggccgatcccgagcacaccaaaggttgagttagattcgttggccacggcaaacgatagaccactgaggtctaattcgttgtactttaatttatcttgaccaaatgcaccttctgcataggttccgtcaccgtaagcggcataaaaaggcgaggacttgttggctttgaacgtggacgacttggtcttgtcgaacacgccatactggtcacagtccatcacagaaccgcagtaggggtttcccttgccaggaacccataagtcagctgagcctgtgtctaacagcacagtgaggttttgtgaaggtgtaccaatggctagctcaacagaataaaagctttgctcgttagctagtacaaatttttcatggccgttcgatctcttgctgagttcaccattgtcgccgttctttttttttgtgaagggaatcttgacgtatttcccatcgggaagtactctaccgaatgccggactagttaagactgctaatgtagccactgccgccaattgaagtttcatttttcaatgccgagtaattttgctctatttatcctatataaattcacaaacacacaagttagcggctacagatattcatatataatatatatacgtacatatatatattattatggcgtccagccttcgaccacacaagtttccttttgaggcttatagttctaagttcttcgctatttttaatttcttttccgcgaatagtaatccgatcgccaataatttctactacaaaggaagcgcgaaaaaaataagagatattttcgctatttcttttgcctgtacatggcccggccccaaatatccgattctcgtttctgtgccggattccactaccacgagactcagagccctataagccaggaggccaaaaagcaatctccattaccaacaatatcgcggtagtgaagatttgtatgtatattgaatgccaagacaaaatggtggccaattctgccattccgtcataagggatattgaattttgcttatttcatcaccccacgccattgttttgtcccgcccggaaaaactctgccaaaaaaagagtacatttctggcccatctccgcactaattcccctttcctttaaaatacgctgcttataggcgtcgaatggagaaaaggtagtgagtgattcctcaccctccactcagacgtttctgatatacaattggggaaaggggttcacacacagcaagccggtatgttacaattgtatttagataagtttttcgtttgaatgcgttgaaaattacttgcgctagcttcagctgatgtgccatgtaacgccgttctatccacgctaacttcaatagacttcaatagaaagcaaatagttatataatttttcatggacggtccagagaatgccacaaaagtgcggccatagaatgaagactgtatgaaagagcgccattgtccccacgtgtaactggggcgaagggcaggaattctgagagcaaactttgcttccagcattatgtaaaaaatcgaagcgcacaatcggacgcaaacatctgtgtagacgtagagaaacatgcagttttgatatagacgattcatgttgatgacgagcaaggcaatttcgagatttgactactgaagaatttctgtttaggagccgcttttgcattatcattgccctattacgagcccagttaatgttggttcgcctagtcttgggattgggatatagggttaggacgagtcgatcttagtggtacaaaggaacctctcatcatcctgagtccattgtctgcgttttttcttgaagctgaatataatgttgtaatttgctcgttctagcaacttcagcgaagccagtcttctaatgactccgctgttcccagaaagtgtgagcacttacatatatgaatacagcactatctggagaagtggcgcgctcttaattaaaatgatgcagcgtgttatcacatcttgcgttaccgggccttgcaaaaattgctatgtttttcttgtgcttggtattgcttcgtggagatatatattctcatatcaggacggaattttacaaagtgagaactctaaatggtgtagtaaagagaagaaaaaaaaatgctcagcgatttaccctcattacaaccaccgagattcactaggaaacggagctgtccctcggaatttattgtcaacatatcatccaatgttaatgtagaatgagttaccgtctgttacttttgggacggtttttgcactaagaacagacgagtttacggttatcctcaacaagcaagcaagtatttgctaatctagatgccattccgaatcattactcatacgttactattgagagatgttttacaatagatgagaagaatacaatgtccagagctcctggtatgctagagtgcatattccaggtcttattcgaatcatatcataccgtccatttcaacaatggtgaaatgtggtccacatatatcagaaatcttaacatttagtgaggagagccagtagaaaaatgtgcgcaagcggaaagaagtcattcacagacacgtttaacaaaacaccaccacagcagctttgtctcttgattctgatcagtttgccatcgaagaagcaaaattgtggtgttatttttttcaaacaaaacttttttggcaacagcagttttcttctggatatttgtactttatcatccaaccgatgaaagctggtttcctgtcaacctacatttaaatggcccgtacttcttcaaaaccgctagataagcaaattaacccaacttttgagcgtcctaaattccccttggctcagaagactcgttaatatgggaagtttaagtcctaccatataatcaaattggaagctttctgtgttcgaatggctattctaaccgctgggctattaatcagaggggaagtgaaatgaccgagacgtattatacgtcatgttgacatcaacaatttaaggaaaaaaataaaaaaaagcaatgaaaaagggtttttttaagttgaagacccttttcaaatatatgttgctttgaattgtatctaccgtctcgtttcttctgctttaccgtttttttttgccttctttagatatgtcttttatgcttgaaaggtccggctttaatgcattcatctaaacgtagtattcctatttttgaactgctaccaatccaccatgactttactatgaaggacattattagtgaacagcttcaaaaaaataaacttttcaagtcattaagatatatcttgttgcagcgtaagatgttggtgttcagtgcattctgtacaaaaatccgtgtaataccaagtcatcctcagtttacaaagcttgctagtttcctgcagtttggaatgaaccattaaagacgctaatcttcggatagagatcagctccttgatactgtataatccctatccacttgaattcctgttgcatcccagttctataggcatcacctactgcatcacctacttgtataatcctcgagcaggtatgctagctctgcgtcagtccttgcgatacacaactaatggaatatcttatgggtcaatcaaaaccattcttctagaacgccgagtttccagttttgggatttaagtaatacattaggtgcctgtcacgcaatccgtccgctgtatttctccgcatagaggatttcagtacgagagagtgaagagtcaaactaacgcaacgtagtagtggctttggacattgaaaagaatagtctagtctgccaagcatgggagaaattttagaactaactaataagaatttcatgagccacttgaaaaaggacataacttcgcaagaatccttgaaaagtagaattgaggataaaaatggtgatgtcgctagcccgaaagaggataactatcctctattgaatgaaacagcggcatggccagatggggtgattacctctgaagaaggatgttcatcttcaggtgagaaagagaattcaggcttatgttcagaagaaagttcagaagaagatccagaagaagctgaagaggaatctgcaagggcttttggagagttagttgcagtcttgcgggacaaagacataccactgaatgtattggacgaacctcagatgaaagattggcttgaaaaatacaccggtgtttatagaagctcttggcatggttgattatgaagaaaattccataattttgcgaggtgggagaatactcttgggaaagtgttgagaacaaaaacgccactaaaaacagcaggattattaaaaagtaaaaaaaaaaaattccttttcaagcaggcaaacaatgggttatttgaatggagaagtatgctactatttctgcatgttgtggatctaaggcgatgtgggcctagattctttcctttttttgtttttaccttaattatcttacgttgttctttccgtcagttttacacctgacatgggacaagagaacaaattgtgaaataagttcaagcctctgttgacatttattgatgtatctatttctttgagggttaattaaagataacaaattgctttcttccgctaatttgagcctattgaatttactgggaaatgccaacgtggtcagacatcaattcaagaagtttagttctcagagagtgtaacttgcctgtttggtcgctgcagtgaaactgccattagctctttagaacaacgttctaactatacgaggaccatattacgtaaatcaacaaacctcaagaattagtgtcatattttctcgcagatattactactgacattcagtcagctatatccattatgcatgagcgaaaaaaaagtgcatacaaaaaagcttatttattggacttaataaacgaaactatgtagtgccgaaccttcggatactgatcattggagtgatttgataaagtttctgcagaattctgggaaatgaaggaaatgacgtagcgaggccttcatgcaacactagttgaaattgaaaaaaaaaaaaaccttataagctatctttcctatacgtcctctatcgactatataacccaagcagctgtttcatattttttgcaagaataacctccaaatattcctggcagcttgtatgccattgttatccagctcctggcactgtctttcgtatctattaaactcttcaagggtaagcttgtcttgagacttcaaaagccccttctgagcgacatcactattgaattcagggtgtccttgaaacgtcagcactctgttttgcctgtaaaatccttggttttgacatttttcacttgacgcccaattttggtatccctctgggacatcgaacacgcagtcactgtgcacttcagaaagatttaattcttgagcaccaaataacttttgacccacagagttcagttttagtgacacaaccccaccttcaaaccctttcggattccgtccaactgaacttcctagagcagccgcgataacttgatgaccaaaacatattccagctacgggcggatattcagtcttgctagttagcatctcatttaagaaacttcttaatttcataatccattcaatttcattatcaaatgaatcatattttgaaccagtgatgtatatgcctaaatactcatctttctgaagatctgacaattgagggaacacgtttttttgtacgtggaacacttcatattcgacatcttctgcgatacattccaatttcctggtctgttctaatagcttgatagccatatcaacaaaattgccccatggtttactccattcgttatcttcatctgtataaagaatagctattttttttactgtcattatgatgttttcttagtatttttttgatataattcaattctaatatatgttaatgcataattttcagagctatagcggtatatatttcaaactttctcaattatctatgtgaaattataaaccttatctgtcttttcttctgtacacctcatctgccacttcccactttggcgcgcgttgacattttgcgacaaaaagagattgttcgtggcagtcgtgtaaaaaactgcacctcaatcatgagtttttatgcccatttttcactatttcatatgaaccattggcaatgtacttcagcctaccctcatcggccagagtgtttaaatatccctctaattgttgaagagtaattcggttatatccccaatcttttggcacggtaattttcaaaaaagaatggatcttatgaagtttcattgcgcctaaattagtcagcattccttcgatgaatggcagacttctttgaagtgtcaattcatattttctttctatctcagaatcgttatgtagttcatagttactgttctcaatctccattggggcggtcttttgtgcttgatcaaaatccatctcgctatgttcaataacggaataggttccattttcttttaaaagcacacctttttgaatccagaaatctaacaaatgagttagcctgggaggagcaatatttagtgactcagaaagctgctctagtgataaacaaattggctcatcatttggagaatcaaactgatttattacgctgcattgttctaaagaaacgtctaacactaatttcctaccatctttgaaagctaattgtatttctacttttcctttatctttgcatagttgtaacttgcgcccaggtttcagctgtgagtatatatcagaatacttctgtagctccctttctaaatctattggtaaatgaaatgcaagatcattagaaccttgtgtatcgcagttgtacttccagtagaggagtgagataaattttggaaatattatgggatccagtccggctacttcatgcattttacggcagagctcctcgctacattttatatcccaaagcataacatcaatgctattcaaattcgactggtctgcatctgctgcaggggctgttgtttctaggagtcctaatataccgtttgttatataattggaatgacttgtttctgtgaatttgactattttttctcttattaatttcaaacatcgggtccatttttcatccaacgtataaaatttcaaagtgaataatctgtcggttaagagatttcgaaattctgatatgaaaaattctcttgattcaaatagatccaaaagcacctcaaacaaatttgtcttaatataacttgatttgatgttaccgggaatcatgtcattaggctctggtacccaagctatataataattgagtatatgttcgtatagcatggcgtgtcttattggtaggtccttgttcaattccctctttcctttcaccttgaggttccatagaaaggggctttttttattcttgtcccttttggtgatgttcgtatcttgattgatatcagaatcgtgcaaagtgtctacaagtgagagcagtgccttcatatctacattgaaattaattttctcctttagttcttcttcaggtaagtccaacattgcgtataacaatacatttactaagtgcttccgctcctgaaagtaaggtttaacaaacgtggttattgaatgtaggcatctccctgttggatccaggaccaaaaatgctttgatagttttaacatatctcaacaaagcgtccaccgtagttacgctggggtttagaatgtatttcttgaaatcagacaaaaaagttgttacaatatttgtgtagtctttaaaatctttcataattttcctcaattccaataaagtaacctttgaatcaggataagccaaaacgcatatatcaaagatttcattcgttcttatcctaagaaaattggactcaaaacagttgaaaactgtagtggtcagttcgtgatcatcctctggacaaccgactaatttagagaactgagaccaatattgattaataaatttgttgaatgtttccataatcataaaccttttattccatactctactcatgttatcttcacaaaatttattgattttgctgtaaagagcattgactatcaattccgtagaggataaggaaccattagcagatttgagccattggattaaattgtctgccaggtcgaaatcatcatccattattaatttgtctaatcttgttcttaaattatttttgaactttatatttctattcaacagataatgtcttaaagaattaagttcaagtgcccagtcgtttacatttacgtcaaaaataggaacgtaacgtaaaggaaactcgtaataattttcccatcgttggatatcttttagataattaatgttgttaaaatgtaagaaaaaatgataacgaacctggaaaatataaaactctttgagcgtggaaaaaagttgtagttgtaactctttgtttgtatttccctcattaactattgaattgtttgcctgactagtgtttatcatgctatatggcgatgtggttgcgttattagggaagagaaccttaatgatattcttaatacgaaggcttggaggacgtagttgatggttactcttggcatcattagggctcatccatgtaagtaaagagttcaaatcatcgactatgtttgtgtgaaagatgtatgaggaaagtgtttgtaactcatctgtaataactttcaaatctcgagttggggtaatctgaaatgacatgatggaaaaaccttaactataagccataaatatttacagtcccgctaagtctggctttcgtctagttttcgatattttggctcttttgtctattactgtttttgtaaccaaaggtttgaaaatttagatgcaactaatgaacttacgcagtaacatgcaagtacccaataaaaaaagaaatttttgaagagacgttcttgcattcaggacatggtatgtttttaatttcgtttctttagttctcaggctcttcaaagtactaacactttattggcaaggggcgctcaaatgtgatgcatcattatagagtaataataaaataaaaagaaaggatgcaagcccggaacaagaggcaattgaatcattcacctcattaaccaaatgtgaccccaaggtatccaggaagtacctgcagcgtaatcactggaacatcaattacgctctcaatgattattatgacaaggaaatagggacgtttactgacgaggtttcaactgtggctcatccacccgtatacccgaaggagctaacacaggtatttgaacactatatcaataacaacttgtttgatatagactcactggtcaagttcattgaggagctaggctacaatcttgaagatttagcgacattatgcttagcccatttactggggtacaagaaactagaagaacccttaaaacgagaggacttcctgtcaacatggtttatgcaaggctgttccaccatttcagacatgcaagagtgcatcaagacgttagatgttaaattacatgaagacttacaatatttcacacagatttataactatgctttcaatttgattctggacccaaatcgaaaggatatagatacagacgaaggcatccagtattggaagctatttttccaaccagagtacccagtgcgtatggaaccagatttgcttgaggcatggttccgtttccttcgcgatgaggggaaaaccactataagtaaagacacctggcgtatgctgctcctctttttcaaacgataccccactattcagaaaataataagcgattacgacgaaactgcagcctggccatttattatcgatgagttctatgagtgcttacaggatcagcaataaacatcctttcatatacttaagggtatgctgtttaatattgcatggaatacgttacccttctaagatagatgggaataaggcggaaataaaaaacgcgatgagcagtggaaaatttttcagaaattttcagttccctcataatatagatgtagatattgtataaggtcgtacgtatatcagagtagccactagaaggaccagagaaactggaataagagctattatggtcaaatcataccaacgttttgagcaagcagctgcttttggtgtaatagcctccaatgccaattgtgtttggatacctgcgtcatccggaaatagtaatggtagtggaccaggacaattgattacgagtgctctcgaggacgttaatatatgggatattaagaccggggatttggtcagtaaattatccgatggcttacctccaggcgcatctgatgctagaggcgccaagccagccgagtgtacatatttggaggctcataaagatacggatttattagctgtcggttacgcagatggtgtcattaaagtttgggatttgatgtctaagactgtgcttttgaattttaacggtcacaaagcagctataacattattacaatttgatgggactggcacaagattaatttctggttccaaggactccaatatcattgtatgggatcttgttggagaagttggtctttataaacttagatcacacaaggattccattactggcttttggtgtcaaggagaagattggctgatcagcacctccaaagatggaatgatcaagctatgggacctaaaaacacatcaatgtatagagacacatattgcgcatactggagagtgttggggccttgcagtgaaggatgatttactgatcacaactggtactgatagtcaagtaaaaatttggaaactggatatagaaaatgacaaaatgggggggaaactaacagagatgggtattttcgaaaagcaaagtaagcaacgtgggttaaagattgagttcataacaaattcgtctgacaaaacctcttttttttacatccaaaatgctgataaaaccatcgagactttcagaattagaaaagaagaagaaatagcaagaggtttaaagaaaagagagaagaggctaaaagaaaaggggttgacagaagaagaaattgcaaaatctattaaagaatcctactcctcctttatattgcatccttttcaaaccataagatcattgtataaaataaaatctgcatcatggacaacggtctcaagttccaaacttgagttggtattaactacatcgagtaataccatagagtattattccattccatatgaaaaaagagacccaacaagccctgctcctctcaagacacatactattgaattgcaagggcaaagaacggatgtgcgtagtattgacatcagtgatgataacaaattacttgccacagcatccaatggttcattgaaaatatggaatatcaaaacacataaatgtatcagaactttcgaatgtgggtatgcattaacttgtaagtttttgccaggtgggctactagtcatactgggtacaagaaacggggagttacagctctttgatctagcatcatcaagtcttttggataccattgaagatgcacatgatgcggcaatttggtcgctagatctgacctcagatggtaaacgattagtgaccggatctgccgataaaactgtcaagttttgggatttcaaagttgaaaatagcctagtgccaggtaccaagaacaaattcctgcctgttttaaaactgcaccatgatacaactttggaattaactgacgacattttatgtgtacgggtttctcctgacgatagatatctagccatctcgttgctggataatactgttaaggtattctttttggactcaatgaagttttacctaagtttatatgggcacaaattacctgtactatctatcgatatttcatttgattctaagatgattattacgtcttccgcagacaaaaatatcaagatttggggtttagattttggtgactgtcacaagtctttatttgcccatcaggattcgattatgaacgttaaattcttaccacagtctcacaacttctttagttgttctaaagacgcagtggtgaaatattgggatggcgagaaatttgaatgcattcaaaaactatacgctcatcagagcgaagtttgggctttggcggttgctactgatggcggctttgttgtttcttcatcccatgatcacagtataagaatctgggaagaaaccgaggaccaggtatttttagaagaggaaaaggagaaagaacttgaagaacagtacgaggatacattgctaacttctttggaagaaggaaacggtgatgatgcatttaaagctgatgcatcgggtgaaggcgttgaagatgaagcatccggtgttcataaacagactttagaatcgttaaaggctggtgaaagacttatggaggcgctagatttaggaattgctgagattgaaggtttagaggcatataacagagatatgaagctatggcaaagaaagaagttgggtgaagcgccaataaaaccacagggtaacgctgttctaattgctgtgaataaaactcctgagcaatatattatggataccctgttaagaataagaatgtctcagttagaagatgcactgatggttatgccattctcatatgtcctcaaatttttaaaatttattgataccgttatgcaaaacaaaactttgctgcactctcacttaccattaatttgcaagaatttatttttcattatcaaatttaatcataaagaattggtttctcagaaaaatgaagaattgaaattgcaaataaatagagtaaagactgaattaagaagtgcattaaaatctaccgaggatgatctaggctttaatgttcaagggttgaaattcgtcaagcaacaatggaatctaaggcataactacgaattcgttgacgaatatgaccaacaggagaaagagagtaatagtgcaaggaagagagttttcgggaccgttatataataaaactattatcctacataataccggcattactctgcccttttcacacttcaaaaggatagattaaattatctgtatattatacaattccaatcataaaaattgtcattccgattgcccttcggtaataatgggcatatccaaataacggaatatgtgttttttatacttattggtcgctgacatatgctgttttttgcgagatgtctctcgtctctgcagagcagttgtaaaattataggtcatgcatttttttttttttgataatgaataactatctaatctaacaaaatatacgtgagatactatgcccatttccctagaagagccattaaagcagctccacaacacatgatgagatatgcactaagcatttttttgaggccatcaggtcctttgaattgattagagtataagaattcatgagccattaattcgactagtccagtataaataagaattcctgatgatatcgagtcaaaaacaccattagcaattaatgctcttctagagccaggtatccaagagtgtctgacaccaatacctaccgcgactgctatgggtgacgttaaagtgaaggctaatcccattaaccaaggcatgtacttcttactttctggccaattcgtttcggcaactcttgtgcctagacccaaaccttcgaacatttggtggaaagttaaaacgataaataaggtttcgaattcttcacccgcgacagatagcgaaagacccacaaatacagagtgaaagatgatgccaaattctagaataaaaacagctagtatctgattgagatactgctctttatcttcctcctcgatacgtgtggccaactgggagacatcttgatggtcattttcgtgagaataatgatcttttccaggtacagaagcgagatttgtcgcatgggaactggttggaactagttcattagctagtgactctgtttttcccggttccagatcataattagtaacatttgagccgggttctttttcctttataggagtagcgacaatctcttcatttctagtagtgtacggagttttgtcattatggatggagtaggcagcttcgttattgaaagatacaggatccgagtccatatttctgatgacaaatcccgaactgggagcatcaacatcaatactggtaacttccccatggtccccatgatcgtgtcccagcgttttcgctacaaaataatgcgtgatgatttcagtgaagaaaagtaagaaaagcgacattaaacagatcccaaaagcccatggatattcggcaaatgtgccaccaagacattcatctcccagagcttcggctgcgggctgtagaagatgaacgaacgctgtggcaacaatgacaccagaaccgaagaacttcgctatgaaaaagcaccaatttggtagccttataaacgaataccgtgatgacaaaattgggaaataaactcccaatcctgacgatatcagtataatgaatactgccagaattctaagacctgcgtgcccattgtagccgttagaagcttggcaagtatctacggagtcatccctcgctataagatcaaccatactttcgaatatgcagtgtcacttggaaacgcctgcaatgttttctttggttgatgcaccgttgtattttcggagatcaactttagctttcttccggtctaaccaacagggtgtatgattcaataaacagtatcatcatatatagtgggttttagatcgtgtctcccaaaaggttgcgtcatttaaaatcgtcacactgtgttttaccaaaggatgtgtgaagctggtttgtagtagttaaagggcaatgtaccctaaaggttgtgaaaaattttcattttcgagaaggagtcgcatataacctttagggttatgtccctataaacgatgactattgccttttttggcccttaagactacagtgtacgtaaatcgtaaagaaataaatgtattatattattgttactattatttattatgttaatatcatgcatagataaatgttcgtcagagagcatcagtttcgtttgaaagggtgcggttcgagttttgctcgtgcgctgctgtggatgggggtggatccagtaatccatgtttgcgcatatcatctcgcagctgttcctccattttcattaggacgctcccatctttatcccgggcgatagtttcttttacgggacttgtgtcatgcgggctgtcaagcaggctttttttgggagatgtaagtttcttgttgatcgaatgttctaatttcttaccgccggtgcaaatcatccgacttctatgcaccattagagcatcctccctattaaatctctttccgcatgggcagatgtatttcttggcattatgggagattttgtgtcttattaaatcatgattgcgaacaaacgccttggtgcaaccgggaaagtcgcatgaatacggtctatcttgcaaatgtgtctgaatatgcgaccttatgttgtatctacgcttgaatactttgttacagttagggtataagcactcgaatagtttgtcgggtagttccttgacgtactggtcaatggtacccggaggcagagtagttggtttcttggttattttcattggcgtagtcctaggtattatttcatctggtaaaggagacgtactatgcaaagtggggcttttgtgaatatcatgtgtgacaggtggtacttgcggatagctttccacttcacagtgactgttatttcgtatgggtgtcttaatttctaactgatgatctgttaaatccggtgcatttagaagcggagctaggttacttccgttctttggtggagctttgacgggagtatgttgaaatacatgtttttgtggcaaagaattcttaattggagtgttattgctggaaccaggaataggaggtagtacacttgatgacgctaaagcgtttgcatttcttaatgttgggttctgggtatttcgcatgtggatgggttcagtgtcatcctgcagttgtgatattgtcgagaccgtggaaactacggattcccttttcttgtggataggtgacaactgtgttctaggcgtgaacgtgccagcagcatatcgatcatccctgcttttatctgtgccgacgaggaagggcgatctcaaactatttccatttatccttggagagatacttagcccacccggggaagtcttttcgaacagacggaatatgttatcaccagtactattttttttatcattattgtttttatcactggtgttattatggtcattataagtcaagccgtccaagtttaaattataattttgtggagaaaatgaaagcagttcagaatctctcaaataaccactgttagaggaaaaaaggttcaatccattactttctgggcttttatttggatatcgttgcctatggtatttcctggatggtgaaccatttattgaagtatttgacatccgaggcgatattaacgtcggaggaggaaattgatatccgccatttgcagagttcgttgtgacgattatagcattatctttcattctaccgttttgcatggcaggtgtctttagtattactggagatccaggtttggaattagaatttgtagccccagaaaccaacttctgcgccacctcttcttgctcttctaatactttacgcaacttttcttgctgtatttgattgtctctcaactgcttctccaatttttcgttcacttccttttgtttttcaagagcaattcttaactcctcctgctgtttcaacaaaacttggctcaaatagctattttcaccatcattttcccttatatggtcaaagtcatcattgttattttttaccgtattatgattacccaattcatttatgagttccatgggttgcggatctttagacatatttagaatggattgctgtaaactggaaatactcaatgtcttattatggccgagaaatccaaatatcgctgtgccacttagacctctcttgtgtgaggacattgattttttgctatagtgggagactttgttgttttcatcaccaaggttccaagttctatcaatattctttttatcagaagaaccatcgcccgtcttaggagaaggcactaaaggaatatccagatctcttaactcttgagtcaacaggtcatcgatgttatagtagtccatacctaacaagttatcgaggccatcatcgttttcattattcaaaatataattgtcgggtgggggtatggtaggattgacattatcatgatgttgaacatactcctcatcttgagtgtctttcgcgaagcctgagggatttatataccacggatctacaacgttatccatgattgtattaacaccgtttttggtcctatagatttctttagttatttcttgaatttatgccttgtatttttttcttctagcactttaactgttgcttgagtctccctgcaacgtagcttttgtttgctaggtacaatgccgagagaggttgttataagtttatgtgtactataaaacccttaatgaaagaaaagggacagaaatattgcgagtaaacaaacagtactccctccttaatatttgcccgttaatggctaaatgctttctggagttgatttactagctacaagcatccttatcctttacctgtaaaccaaaagtgtcctgaaattttcccaaagtgccaatgtttacattttgccgttttgagatatatatcgtatattatgacaaccttcacctatctgacgagccgctctcagtgccccggtatttttgggcggctattcctataacactattagttaaaagggattctaatggagtgacggttttcatcacaatagatagagttaactaagaactctagtttgtatgcaaagtcattattgagtagtaaaagcgcccccatcgtctcgtttaattgttgataacgttttaatgtggcttttgaagggttgctagcgatggcaattgaaacatgtaaattttgcctacttacaattaaatcctgatagtttgaaatgcctgatttctgaagtgcctcagctattatcgttttgaaaggagaaatttgtgccttattgggacattctgagacagggagaccgaggtacaaggtgttggctcgttctgatatatataacttcggatatgagcagatttgaagtttaaaaggggttatttcattatttcgtaaaccattacgcatttcttgaatgaaaacatgtctttgttcttcagtttcaaacaacaacgatcgagttaaggaaacgtgtaaaggtttgggggctcccaagtgtgagatgaacaacgggtcaaaatccaccagttgatacggattagtgtattcctgtttcataaatgtttctttatatttacatatgattttctgaagttgtcggtgaatcgctggagtcggacgccactcaaaatatgtgaacgaacgccaaaatcgactcatattcatatcctggtgctcgtacttttgtaaattcggagggatgtggtacttcaatataattgaatccggtattgcaggtaaatcagtggaatcggctttctgtatgcaagttttctccgtgtattcgatttggacctcacttttgttactactttcgctctcggtatcactaccgtcactgctagaatagtctgcagatatgaattccataggccagtcttcttctaagcgattggtaacctccttcactttagaacaccaccaacagatcgttctcttgttctttgttctttatggtataatattcacatggtgctctaccgtttttcttgtcggcccagccggttaaatctcgaagagacagaatagaagctctgtggctgtaagtaaggataagccaaatggaaaagttatagaattaggacaacaatatacagtttttttttgtactcttatagaatacacacacatagatacgcacgtaaaattagagcaaaagatggtacaagaatcacgtccagggagtgtaagaagttactcggtcggttaccaagcaaggtccagatcgagttctcaaagaagacattcgttaacacgccaacgttcctcgcaaagactgattagaaccatcagtatcgagtctgatgtgtctaatattactgacgatgacgatttgagagctgtcaatgagggagtagcgggtgtgcaactggacgtctctgaaaccgcaaataagggaccaagaagagcatcagcaactgatgtcacagatagtttgggttcgacttcgtcggaatatattgagattccctttgttaaggaaacattggatgcaagtttaccttcggattatctgaagcaggacatattaaatctcattcagagtttgaagatatccaaatggtataacaacaagaaaatccaaccggtagcacaagatatgaacttagtcaagatctctggtgcgatgacaaacgcaattttcaaagttgaataccctaagttaccatcgttgctattgagaatatacggaccgaatattgataatatcattgacagggaatatgaattgcagattttggctaggctttcattgaaaaatataggtccttccctttacggctgttttgtaaacggtagatttgagcagtttctggagaattctaagactttaacaaaagacgacattagaaactggaagaactctcaaaggattgcaaggagaatgaaggagttacatgtaggtgttcctctcttgagttcagaaaggaagaacgggtcggcttgttggcaaaagattaaccagtggttgcgcacgattgagaaagtcgaccaatgggtgggggatcctaaaaacattgaaaactctttattatgtgagaattggtccaagtttatggatattgtcgatagatatcacaagtggcttatttctcaagaacagggtatagagcaagtcaacaaaaatcttatattctgccataatgatgcccaatacggcaatttacttttcactgctcctgtgatgaacacaccgagcctatacactgcaccttcgtctacatcattgacttcccaatcaagttccttatttccttcgagctccaatgtcattgtagatgatataatcaacccgccaaagcaggagcaaagccaagattccaaattggtcgtcattgattttgaatatgcaggtgccaatcccgccgcatatgatttagcgaatcatctttccgagtggatgtatgattacaacaatgctaaggccccacatcagtgccacgctgatagatatcccgataaagaacaggttttgaatttcttatactcttatgtttcgcatctaaggggtggtgctaaggaacccatagatgaagaggttcaaagactctataagtcaatcattcaatggagacccactgtacaactattttggtcgctctgggccatcctacaaagtggtaaattagagaaaaaagaagcctccactgccatcactagagaagaaattggacccaatggaaaaaaatatatcatcaagactgaacccgaatcccctgaagaagactttgttgaaaatgacgacgagcctgaagctggcgtcagcattgacacgttcgattatatggcttatggtcgtgacaagattgcggtcttttggggcgacctcattggcttaggcataatcaccgaagaagaatgcaaaaatttcagctctttcaagttcctcgatactagttatttgtaatacgtatacgaattccttcaacaaaggccaaggaaataaagcaaataacaataacaccattattttaattttttttctattactgtcgctaacacctgtatggttgcaaccaggtgagaatccttctgatgcatactttatgcgtttatgcgttttgcgccccttggaaaaaaattgattctcatcgtaaatgcatactacatgcgtttatgggaaaagcctccatatccaaaggtcgcgtttcttttagaaaaactaatacgtaaacctgcattaaggtaagattatatcagaaaatgtgttgcaagaaatgcattatgcaattttttgattatgacaatctctcgaaagaaatttcatatgatgagacttgaataatgcagcggcgcttgctaaaagaacttgtatataagagctgccattctcgatcaatatactgtagtaagtcctttcctctctttcttattacacttatttcacataatcaatctcaaagagaacaacacaatacaataacaagaagaacaaaatgtctgaaataaccttaggtaaatatttatttgaaagattgagccaagtcaactgtaacaccgtcttcggtttgccaggtgactttaacttgtctcttttggataagctttatgaagtcaaaggtatgagatgggctggtaacgctaacgaattgaacgctgcctatgctgctgatggttacgctcgtatcaagggtatgtcctgtattattaccaccttcggtgttggtgaattgtctgctttgaatggtattgccggttcttacgctgaacatgtcggtgttttgcacgttgttggtgttccatccatctcttctcaagctaagcaattgttgttgcatcataccttgggtaacggtgacttcactgttttccacagaatgtctgccaacatttctgaaaccactgccatgatcactgatattgctaacgctccagctgaaattgacagatgtatcagaaccacctacactacccaaagaccagtctacttgggtttgccagctaacttggttgacttgaacgtcccagccaagttattggaaactccaattgacttgtctttgaagccaaacgacgctgaagctgaagctgaagttgttagaactgttgttgaattgatcaaggatgctaagaacccagttatcttggctgatgcttgtgcttctagacatgatgtcaaggctgaaactaagaagttgatggacttgactcaattcccagtttacgtcaccccaatgggtaagggtgctattgacgaacaacacccaagatacggtggtgtttacgttggtaccttgtctagaccagaagttaagaaggctgtagaatctgctgatttgatattgtctatcggtgctttgttgtctgatttcaataccggttctttctcttactcctacaagaccaaaaatatcgttgaattccactctgaccacatcaagatcagaaacgccaccttcccaggtgttcaaatgaaatttgccttgcaaaaattgttggatgctattccagaagtcgtcaaggactacaaacctgttgctgtcccagctagagttccaattaccaagtctactccagctaacactccaatgaagcaagaatggatgtggaaccatttgggtaacttcttgagagaaggtgatattgttattgctgaaaccggtacttccgccttcggtattaaccaaactactttcccaacagatgtatacgctatcgtccaagtcttgtggggttccattggtttcacagtcggcgctctattgggtgctactatggccgctgaagaacttgatccaaagaagagagttattttattcattggtgacggttctctacaattgactgttcaagaaatctctaccatgattagatggggtttgaagccatacatttttgtcttgaataacaacggttacaccattgaaaaattgattcacggtcctcatgccgaatataatgaaattcaaggttgggaccacttggccttattgccaacttttggtgctagaaactacgaaacccacagagttgctaccactggtgaatgggaaaagttgactcaagacaaggacttccaagacaactctaagattagaatgattgaagttatgttgccagtctttgatgctccacaaaacttggttaaacaagctcaattgactgccgctactaacgctaaacaataagctaattaacataaaactcatgattcaacgtttgtgtatttttttacttttgaaggttatagatgtttaggtaaataattggcatagatatagttttagtataataaatttctgatttggtttaaaatatcaactattttttttcacatatgttcttgtaattacttttctgtcctgtcttccaggttaaagattagcttctaatattttaggtggtttattatttaattttatgctgattaatttatttactttcgtattcggttttgtacctttagctatgatcttagctaattgaagagggtggtgtgatctttaaccataccttattatctttcagctgcttaccattttcttatattgatttttagcgaaagatttttattcacaagctttttttatccttaatgctcgaatactacaacaaaacaaaaaacattaaacagtttttaattttgtgaacaaactgaattacaaggccttacatcttatttagaatatattaagaaacagaggccaacatgccttcttaattatattgatatggacctctgtccttcctaaaaacgggtttttgttcgatgaaaaatcaccagtagagcaccatatatgaatttacaatcattgtagggaaaagaaaacttgttctgcttcgccaattgatttcatttctttttttcctttgtttttgttgtatactattaatatgcgtagttctttgtcacttagtggttttttgtttaatttataacgcgaaagctgcatactaaaaatatagagatgaatggaactccgaacaagcaagagagatattatctatctctgttccataataataaccagtagttcagttggggaacttaataatggaacttcagagggcacaacggaatttgaagtttttacaaaacgaggattatgtgaacgttaccgatcaaactaacctgaatggagagagccagaatgcttactctttaggaatggaaactcaagtaccggaaatgcagttttccttatcatctgatgatgattcaataggtacgcaagtaaaaagcgtaactgcacaaaaatcgcctatgacgcaagagactacgaaaaacgatacagaaagaaataaagatgttgataaaagttgtaacccagtcagcacttcccatcccgatttaggcggatcaaatatcgaggagaacatattcattaacactcaaattcaaagccgacttgatgacgcagaggaagaaacaaatcttaagttaaaacttgaaaaattcaagtattcgttcaagagtagtaacgcagatgatacccacagcaatgcaaatgtaacagctaaaagaagaccagcaataaggaaggctaattcgaaactcaaaacaaaacctaaaactaaacgagaccctaaaattatcaaaaatataactgatttcaatattaataactacgaacgttcaaggactgccagcttattaaagcaattatcaggtaagcacaagaaggttttggacataataaagacgcaaaatgaaggaaacagtgataaacctcccagagcaaggaataacaagggtgaaaaagctacttttgatacatatagtgaacaggagtggaaagatattatgaaacttcttctacaaaagtttccgcaaagtgaggaaacggatttgaatgaagtccagaaatttttatatggaagcgaaaaaagctcgaattctctagacaatcaagaatcctcacaacaaagactttggacagcatcacaattaccacccgagcttcccgatgaggctattcaaccagagcaggaagaaaggatacgcgatacccaaagtgcagtaaatttcttatcgttgtctcaagtaatggatgacaaaagtgaaattatgaaagacgaagaaagcataattatttcacggggagattctacaagctctcaagaatatggaaacgggttagagccacaacaaccggtaggaaatgttgttggtgaagatattgaactggctgtgggaacacgtataaatgcattttcactgacagattataaagcttgcaaacctatgtctgttgaggtaagtagaagatgcgaaaacagtacggataatgattatgacaatatttctattgtctcagatactacagatgagacatccacattgtttccactagaccagtatcggtatgttttcattgaaaatgatgaaagaccaccattagccaccgacacgataggcagcacacagtttttcactccaaacacatcgcctttggatgggataatcgatttaacacaggaatcattcaaagctgttcgatcgttaatatcacctttgaaagtagaaaacaacaaaacaggggtaacatcacaagcatcaaatcaggttcaggtaccagctacaagaacccctacaattattcctcaaaagaaccttactacaactttaaaaactgaagaagaaaagaataacataggaagttccatcagagttaaattattgcaagaaagcgtagttaagctaaaccccaaactggtgaaacataacttttatagagttgaggcaaatgattctgaagaagaggagacagaatttgatgaccaattctgcattgctgatatccaattggtagattcctccaaaatttcgactaaagattctacacaaaatcctactactagcaacgacattattgatacctctgcagctagttccatagcttctcccgagaaattttgtgagatcatgatgtcccaatcaatgaaagagcttcgacaaagcttgaaaacagtggggttgaaacctatgaggacgaaggttgaaatcattcaatccttacaaactgcatctcaaattctgtccacagctaatccagataataaaggtgagcatggtggggtggcaaatttcagtaagatagaaatatttgatcatttaaccgaactaattgaagccttccctgattttttggagcgaatatatacctttgaacccattccgctaaatgagctaattgaaaagctgttcagcgccgagccatttgtttcgcaaatcgacgaaatgaccatcagagaatgggccgatgttcaaggaatatgtctgagaaacgataaaaagtagtgccgaatgattgagaatttgacaaaacaaaaacaaaacaaaacaaacgttacgtatagatgaagaatacacgtacacaaatatgcatatataccgtcatgaagtagcttaacttaaataaaagttttttttttttagagttaccaatatcgcaaacatgaaaatgagaataaaaaaaaaaaagcagaaaaaaaaaaagcataacatggagaaaaaaataataaataattgagtttagttgagacgccggtcttcgccaggccaggaattgtttcaccaggtcattctctgcaaagcctttactttaacatttagattcttcttcttggcggagccgcgaccattgcttctcttttcgtctgattgtttgctagtcgaagagacgttacagtaagtaccagctttcacgtaaacagcaatgtcgttgtcgtcgccatgtttgaagcagcatcttctgccataaggacaataacctagtttctcccaattcacacagggcttcgtcctgaaattcttgcacgatttcttaacctttaattcgccgagtccgtgagcaaactgacacttactgccataagggcaacttccttttaaagtgaatgattcgcacagctctgtcttgtataattgtttgggagtttcctgcacttggcttttcaccttaggttgagctgaggattccttctctgatgaaaaagaagcatcatttttgggcttttgttgagacaactgttgcaaattctgtgaagttaatggtaattgtgaagattttgggacatagtccggatttatttgtacctctagtttctttttaaaagtagtaggtgccgtgctattcaggtgagcggatgggagaaaagggttcattaactgtggatcatacagtagccccggttgaatagcgtttgtattttttggtggagagaatgaaactgccgaagatatttcactgcttgtttcctgtatgttatcctcgtttaaaatcgtcttgttgtaatactcctccagttccctaatattgatctggtactggtagtcatttaatggattttgctcttgatctgtggaaaacaacgacgttaagtcagtcttctgagattctggtctagtatatgataattgagcccacatattgcgttattttttacgtattgagtttgcagcactgtttcgctttctctcaagatgcacaaatacgacctaccaagagcctccaagtcccaccaacgattatgtcttctctcaaatatatatacaagttacatgtagagaaatcgagacgagattgctggcacaatgcacccaactgcatgtgccattgtgcatctacacctccaaattagggtgtcgattggcgtcgtcttctttaatgtgggtgcattttgcggcggcgcgacaaatatagagaactgaccaaggcagtgctgtcaagaagagagaatggttacggcagcgaagacgcaaatgggctaggcagaatggcattcaagttatggctactggatgaggaaacaatatacgagcacgtgttcgaacggtacacacaattggagggccagtccgggaaactggcgcaggatttgggtattcaggatagaaggggcggtgtgctagagataacgtttgaaccctctgggctggaaggcggcagaaaaaaaaagcgagtgagaagaagaaataaggctagtagtgttgaagaagatcagaatgttgctgtggatagctatcatgttagcgtggggcagtccatatcaagcttgcgctcgtccagagacaacggaaactccaccacaggatacgttttgtggtctaccacacctttcttcatcaactggctgctgtatagtactagcgctgcacctttccgtcttgggagtcaggtggaagtaacctgcgggtcttcttgcgaggggcacaagcttgagttgcccaggctggtcgacctcacgggcgctgatcgcggcaagagaggtatcttggaacttggagcaggaatatcaggtattttgcccgtgattcttggtaacttcgtcgacacctacgtgtcgacagatcagaagggcattcttaataaattaaaagataacatcatggaaaacttatcacagttgaccagaaagcggtgcatttcccgatcactaagattggaacttcccaccgtcgaaccagttggcgacgctgatatcaccgcagcgtcacttccatctaagtctacgttgcatttggaagtagccgctctagactgggagaagataaacttgcaagacaaaaagacccactctctgcatcctgagttgtcactcataggtgaaacatgttcttccgtgtacgttatagctatggatgtcatatacaacgagtacctgatagatccgtttctgaagacgctcaagcaactcaaacactggttacaaactacctacaatttgcaattccatgtcctcgtggggatacacttgcggtcacaagaggtgacaacactgttcttggagaaagccatcatagaatatgacttcacggtttatgatatcgttgaccaggtcatacaagagtcccgttttaacttttatcttatcacctagtcccatatataataatagaaacaatataatgctgataatcttatttttctttgcgatgcggcagtgcctcttcccctccgtacggattgggaagattttcatttttgattagcaagggcactaagccaactctgtgtgatatagctaataatctaaaagctgctggatccgttatcgtcaagataaagcggacttagcgatttacataggatcacactttctacacacatttgatttttaagcttcattttccactgcacttatttttcccaagcatcgtgtttttttgtacattataaaaaaaaatcctgaacttagctagatattatggctatctgggagcaactagaagtctcaaaggcgcacgttgcttatgcatgtgttggtgtcttttcatctatcttctctttagtgtcactttatgtcaaggagaagctttatattggtgagtccaccgtagcaggtatatttgggctaattgtgggtcctgtttgcttgaactggtttaatcctctgaaatgggggaattcagacagtataacattagagataacgagaatagtattatgtttgcaaatttttgccgttgccgtggaactgccacggaaatatatgttgaagcattgggtatctgtgacgatgctattattgccagtgatgacagctggatggcttattattggtctcttcgtttggattcttatacctggcttgaatttttctgctagtttgttgatatctgcgtgcattaccgcaacagatcctattctggcgcagtcggtcgtctccggtaagtttgcccaaagagtacctggtcacttaagaaatctactgtctgcagagtcaggctgcaatgatggtatggcctttccttttttatttctttctatgaatttaatcctacatcccggtaatggaagagaaattgtcaaagattggatttgcgttactatcctgtatgagtgtttgtttggatgcttgctaggttgcttcattggttatgtaggcagaatcaccatcaggtttgccgaaaagaaaaacattatcgatcgtgagtcgttcttagcattttacgttgtcctggcgttcatgtgtgctgggttcggctccattttgggtgtggatgacctattggtatcatttgcagccggtgcgactttcgcttgggatgggtggttttctcaaaagacacaagaaagtaatgtttctaccgtgattgatttgctactaaactatgcgtattttatctattttggtgccattataccttggagtcaattcaacaacggtgaaattggcacaaacgtctggcgtttaattatactttcgatagtggtcatctttttacgtaggatccctgcagtcatgatattaagacctcttatacctgatataaaatcgtggcgtgaggcactttttgtgggccattttggtcctattggtgtaggtgcaatttttgccgctatactagctcgtggagaattagagtctacctttagtgacgaacccactcctttaaatgttgtaccatcaaaagaggaaagtaaacattggcagctgatagcctgtatatggccaataacttgttttttcattgttacttctatcatagttcatggttcttcagttgcaatcataactctaggtcgtcatttgaacacgataacgttaaccaaaacattcactacacacaccaccaatggtgataatgggaaaagttcatggatgcaaaggttgccatcgttggataaagctggacgatcattttcattgcatcgtatggatactcaaatgactttatcaggggatgaaggtgaagcagaagaaggaggaggtcgtaagggactagcaggaggtgaagatgaagaaggattaaacaatgatcaaattggtagcgtcgcaacgagcggaattcctgcaagacccgctggtggtatgccaaggaggaggaaattgtcaagaaaagagaaaagattgaacagaagacagaaactgagaaacaaaggtagagaaatattttcatcaagatctaaaaatgaaatgtatgatgacgatgagttgaatgatctgggacgagaaaggttgcaaaaagaaaaggaagcacgcgccgccacatttgcattgagcacagccgtcaatacacaacgtaatgaggagattggaatgggtggagatgaagaagaagatgagtacacaccggaaaaggaatatagcgataattacaataacacaccaagttttgagtcgtctgaaagatcttcatctctccgaggaagaacttacgtaccaagaaaccgttacgatggagaagagacagaaagcgagattgaaagcgaagacgagatggaaaatgaaagtgaaagatcaatggccagtagtgaagagaggagaattcgaaaaatgaaagaggaagaaatgaaacctggtactgcttatttagatggtaatagaatgattattgaaaataagcaaggtgaaatcttgaatcaagtagatatcgaggatcgcaatgaggcgagagatgacgaagttagtgttgatagtacagcccattcaagtttaactaccacaatgaccaatctatccagtagtagtgggggaaggttaaagagaattttaactcccacatctttaggaaagatacattcattggttgataaaggaaaggataaaaataaaaacagcaagtatcatgcatttaaaatagacaatctgttaatcatcgagaatgaggacggtgatgttataaaaagatacaagataaatcctcataaatctgatgatgataaaagtaaaaaccgcccaagaaacgatagtgttgtatcaagagctttaacagcagtaggactaaagagcaaagcgaacagcggcgtaccgcctccagtagatgaagaaaaagccatcgaaggaccctccaggaagggcccagggatgttaaagaaaaggacattaacacctgcgccaccgagaggagttcaagattccttagatctggaagatgaaccttcatctgaggaggatttaggtgatagttataacatggacgatagtgaagattacgacgataatgcatatgaatcagaaactgaattcgaaagacaaagaaggttaaatgcgttaggtgagatgacggcaccagcggatcaagatgacgaagagttgccgcccttacctgtggaggcacaaacaggaaacgatggtccaggtacagcggaaggaaaaaaaaagcaaaagagtgctgctgttaagtcggcgctatcaaaaacgcttggtctcaataagtaatttattaatacacaaagatatattattttagtatatatataaacgaaatgccttttttatttacatgtgtcggaaatagagtagatgcggtaaagagggggagggggggggggtatgcggttttgtcattactcttttccgttaaacttaaaagcttaaaacatcattgataaaggtttttagtgaggtttcactggggttcacattgatgaaatctaattgtctgtaggagccattgttcaaaaatccgcggctgatatctgaatattgaatgatgtatttatcatcttgggcagtgttcgtaggaaatcgtaaattcaagacacgatgggtcaaaacatcagtcaattggtattgctgtattaggttatctggtaaagaaatgttgatttttttcataagattctgatatttgtttaacttccagtgtgacttgagaagaaattcttggaggcctttttgttcagataaccaagcatccggattggtctggtcgaaatcaggtaaaagatcttgaatgtaatctgacgtgatcttatagtctgtctggcattgtggagttcttaagataacagaattttcttgtaatttcaaaagaggcctcattgaggtggtaacaatgttatcgaattcgtcaatctcgaaccaaatctgcaaaaaaggggacgaggaggagccagaggtgggcggcacaggagtgaagttcagctgtatgaaggattgatgcgcatttgttattagatgttgatcaagaggcacaggcacaggtacggctgatgatgatgattctttgtacattggtagattcagtaattttgaaataaaactcttatgtattagaggttggaaaatactagaaaaagacgcggactgtaaggagtgacctagcgttattgataaagattgggaaatagagtcggaaggggagagagatggtatatttttagacaaggaagattcgaattggctgacctgcgcatctgtcaattctggtgtggcgttttcagtgggagtcatcagatctgtgcaatttttagggacaactgactgtaatcttgcccaatcttgtgacttgtttagccagtccaagttctctagagtattgttgaacggatagagttctgtcttgagtgctggtgaggctattgtgtggtggtgttgagttgtgttaggattagaagcgacggcatttaataaaaagactttggccatggatattttcttggtgcttagggctgaaatcttgtacatttgcaagtccgggaggtattcaaaaaaagtgtgagtttccttctgaataaggttgatgacgtcttttgatggcatgagggaatacatacgcacattttcatgagtgatgtttgaccatattttgtttaaggatatttctgcgtatttgagcaagctaggcgaacccttgacggtcaattcgttatcctgaatggagatgatgaatgtcagcccgagcttattgaagttggtgagtattttaccattttgagtgatgagtaaaaggaaaatttctctaggagaatcgaactggaaagtcaatgatgtggacttgatgcctgtgggagtggtgggtgttgaaattggttggcaattccagattttttcaattatatattgggacagcttgcttttcttccagtgcgtcagatgtgaagaggagtctggctgatgtgtggagatgaactcgcgcagttggtagcgattgtagcttgatgtaagcgattggagaagggcattgtattccagggagggcagactggcgcttgtcggtttcttcaatcggatggagttcaatgcggaatctagtgaattctgcttttcgaagacaaggagtttcgagccgaaatcgaggttgttatctccagtttccttatggctacgtttcttagacggcctgtgtctaggctgcttctgatcatttttcactagcccagattgggtagggttcaagacgacgaatttcagattttgcggcagtttcttcttcccatgaaggggcgagcttgggcctgagcttgaataaagacggtaagtaagacgggcgagctttttgttgaatttccacatatgcttactctatattttctccagtgccttcaagctccgtatatattatgtactagttttattacattaaagatacataactttttttttttttttcagttcactgaaataagaaaaggcgggcgaggtgaaaaacaaaaaaaaaagtatagagaaacagaagtggaagaagagctaggaaagcacagcgcatacgacggtcacctaggatggagcaccaacaattgcggaagtacgtcgaattgtacaataaggaggtcgaggaattctacaatggtgccgcgtcaggccgcccagctgagttccatccttccaaagtacatgtaaagagcatccatgaaaaggcgggtaccgccaatgctggtgtagaaatctctagcgttggtgtagactgggacagcgaggagaagaatacctttttctggtgcctttcacgctatagtatccaccgtgtagacgagtggcgctcattgttgcctcggaagagcgccatggagattctaggttattacaggttgttaaggagagcgagtgcgagcgcgagatcgcgtaaggcgggtgacgacggagcgcccattgcgtacgaaatgagcgctgagtgggttgccctggagacaaaactgagcgagacagtgatggccatcacggaaggcgcagccgaggttgccgatgaggaaggacactgcgagggccttatcgattatgaaagctggaaacgcaggtgggtggccatctactcgcacagccgtatcgcggagataagacccttgccccgccacgcgctgccgctatcgcgcagcgcgacgcagactttggagcgctgcgtaagtcgctacacacgtacattgctgtggtgcacggcccttgcgggtatggcttcccgcagcgtcagcgccagggcggccgaatctcgaggacacaagtcgctaccgacggtggtaactcgccggcaagttgagcgtgcactatgcacagaagcccgatcacgtgacctacacgtgcttccaaggcgcattgttttgacactgcgcaaatgggaactagactatccgcgagagggcaaactgttccgcaccaaggagatggcacatctgtttctacaaagccagttgtccagacgggatgcgcccccagtccatcaagacgaaaatcaagaaaatcaagaaaatcaagaaaatcaagaacaagataacactgcaagtgaaggtgaaagcgaggcagaaagggatgaaatcgacgaagcggacttgttccgatcagcattacatgaaaatcagttgctaaaatggttatccaaatgagacacaatgcgaaaaatcgcgcagggacataatttttgttttcattattctttcgcttattccctccgttagctccaccgcttttttgattggaatttcctttcggcaatggctttccggttaccacgcctcgggtttcgcatcccgaaaagcatatctacacaagaaaaatgaatgataaacaattgatgagtggcgctatttcccttatcatctcattattgtacttagtatcgtctattatcaggagaaatcgcatgaactaagcccattttctcacccttctgccttcttatataaagcttgctgggaaccgaacacaaactccacaagtccgtagcagctcttctcttttgtcttttatatatcataaacatcgctacatagtaataacactaacgcacgctagaaatgatagcttccaaaagctccttattagttactaaatcgcgcataccctctctatgctttcctttgataaagaggtcctatgtgtcaaagactccgacacactctaacacggctgctaatctgatggttgaaactccggccgccaatgccaacggcaatagtgtgatggcacctcctaactcaatcaattttctacagacacttcccaagaaggaactattccaactgggattcatcggtattgcgaccttgaacagcttcttcctgaacacgatcattaagttgttcccttacatccccatcccagtaataaaattcttcgtctcttctttatactgtggcggtgagaactttaaagaggtcatcgaatgcggcaaacgtctgcagaagagaggtatatcgaacatgatgctttcattaactattgaaaattccgaaggtacaaagagtttgtccagtactccagtagaccaaattgtcaaggaaacaatcagctctgtccacaacatcctactgcccaatattattggccagctggaatctaagccaatcaatgacattgctccaggttatatcgctctaaaaccctctgctttggtcgataaccctcacgaggttctgtacaatttcagtaatcccgcctacaaggctcaaagggatcagctgatcgagaactgctctaagattacaaaagagatttttgaactaaatcaatctttgttaaagaagtaccctgaaagaaaggccccatttatggtttccactattgacgctgagaagtatgatttgcaggagaatggtgtttacgaattacagagaatcttatttcaaaaattcaatcccacttcatctaaactgatatcatgtgtcggtacttggcagttgtacctaagggactctggtgaccatattttgcacgaattgaagctggcccaagaaaacggctataagcttgggctgaaactggttcgtggtgcttatattcattctgaaaaaaaccgtaaccaaattatctttggcgataaaacgggcactgacgaaaattacgatcgtatcatcactcaagttgtcaatgatttaatcatcaatggcgaggattcttattttggtcacttggttgtcgcctctcataattaccaatcccaaatgctcgttactaatttgctaaaatctacccaagacaactcttatgccaaatcgaacattgtgttggggcaattactaggtatggcagataatgttacctatgacctaattaccaaccatggcgctaaaaacataatcaagtatgtcccatggggcccaccattggaaactaaagattatcttttgagaagattgcaagaaaacggggatgctgtgagatctgataatggctggccattaatcaaggccatagcaaagtcgattccaaaaagagtaggcctatgagaggactataatatatactccaatttcaaagacaaaccaaaaaaccaaaaaaaaaaaaaagtatgcatacataattctgatgttctagttatacatattatatataagtaatgataataacactaatagtaaagtaaacgcacggatatcaagagttaatatacttgaaccacttaaataacaatctgttggtaaagctttcttcctattgattatgggttcgaatagtaccagatgttttgccaatcctaaatcggtaggaaagtggcttgtcgtcgtcaggcttattatcaactcttatgcacaagaaaggtactcatcttctataaactacataagacctgaatctaatcaaagggagaaagcgcagaacatcagatttaaagcggttttgcttgatacactcagccttgtctctttgtaaggattttggggtacctatgaataatacatctagtagtgttagtaaaccaacgtatgggattttgggatacatagttttccagtgtttcttatccgtgatagtttaatggtcagaatgggcgcttgtcgcgtgccagatcggggttcaattccccgtcgcggagaatttttttaagcttctattaaagaagctttttttcacttatatctgatggatgatgaatagctagttcaaacggaaatctttgataaagctatatcaaaattcaaagcccaataagtcagtatcatgaagtttatagcattaatatcaggtgggaaggactcgttctacaatatttttcactgcctgaagaacaaccatgaattgattgccctgggaaatatatacccaaaagaatcagaagagcaagaattagactctttcatgttccaaacagtaggacatgacttaatagactattattctaaatgtattggtgttccactatttagacgctcaatattacggaacacttctaacaacgtcgagttgaattatactgctactcaggatgatgaaattgaagaactatttgaacttctaagaactgtcaaagataaaattccagatttagaagctgttagtgtaggtgccatcttatcgtcttaccagaggaccagagtggaaaatgtttgttccagattgggtctagtagtgctaagctatttatggcaaagggatcaagccgaactaatgggtgaaatgtgccttatgtccaaggatgttaacaatgttgaaaacgatactaattcaggaaataaatttgacgccaggataatcaaggtggcagcaattggattgaacgagaaacatttaggaatgtccttgcctatgatgcaaccggtgttacagaaacttaaccaactttatcaagttcatatctgtggagagggtggggagtttgagacaatggtcttggatgccccttttttccaacatggatacttggaattaattgatattgtcaaatgtagcgatggtgaagttcacaatgcaaggttaaaggtaaaatttcaaccgcgtaatttgagcaaaagttttttactcaaccaattagatcaattacctgtaccttcgatttttggtaataattggcaagatttaacccaaaatttgccaaagcaacaagctaaaacaggagaacaaagatttgaaaatcacatgtcgaatgctctaccacaaacgacaatcaataaaaccaatgataagttgtacatctctaacctacaatcacgtaaaagtgagacggtcgagaagcaaagtgaagatatttttactgagctagccgacattctgcattccaaccagattccacggaatcatattttatctgcgtcattattaattagagatatgtctaatttcggaaaaatcaacaaaatatacaatgaatttttagatttgtcaaaatacggacctttgccaccatcaagagcatgcgtaggttcgaagtgcttgccagaagattgtcacgtacagttatcagttgttgttgatgtaaaaaatacaggcaaagaaaaaatcaacaagaataagggcggactacatgttcaaggccgttcatattgggctccatgtaatatcggaccatattcccaaagtacttggttaaacgatgatgcaaaccaagtcagttttatcagtgggcaaatcggactagtaccgcagtcaatggaaatattaggaacacctctcactgaccaaatagttttggcattacaacattttgatactttgtgtgaaacaataggagctcaagaaaagttactcatgacatgctatatttcagacgaatcggttctcgactctgtcatcaaaacatgggcgttttattgttcaaatatgaatcatagatcagatctatggatggacaaatctgatgatgttgaaaaatgcctagttcttgtaaagatttctgaattacctagaggcgctgttgcagaatttggtggtgttacttgtaagagattaatagtggacgataatgattccgacaagaaagaaagggaagagaatgatgatgtttcaaccgtattccagaaattgaatttgaatattgaaggttttcataacactacagttagtgcgtttggatataatagaaactttattacgggatttgtagatagtagagaggagttagaacttatcttggaaaaaaccccaaaatcagcccagattaccctctattataatcccaaagaaatcatcactttccaccatcacattggatactatccggtggagaaactttttgattaccgtggtaaagaacaccgctttgggttgcatattcgttcctaactccaaatgtaggccttatattttataaacttaatagatatacgctgtccacgctcctggcggtgtaaatgatagacagatcccaaatatgttagcaaatcataggaacaacaccatattgtgaacacgtaaaatttagaatacgccgcacaattaaggtgtgttctgtaataatttgattattgatgatggtttaggaaccaatattcatataaaaaaatgatcattctataaaataccttatcgtaacacttgtaccatgctactaacactgtatatatttctgacccctaagaaaaagcacctgaataagctaaagaccaagttaagctttgcccattgtctaggaaatttctgttgaaatcaggttggctgaaaaagtcgtacgaaaattttggatcaagcagagccatatttaacatgattattcctttccaaccgtcattcacttgatcaattatcggctgcattttttcttcccactcctctttgacaaaatttggtgttctgacccatgaagatgctgatgttataggaatggcgtgaatcatatgaatgtattgaggctccatgccaaaatacgtggcgtgatcaattttattttcgaataaaataccactaactttattaccaataaattctttcggttggacagtattattgctttcgtataggaagtagctctggaaaacatttctcatgatgccgagttgtaagttcgctatgtcagttaacttagaatttccagttaccaacccccacaattttatcgcatagcaagaattgacatcttctgaagtagattcttcatctttaccgtcaccacttggaaatagtcctttggcccatgaatggccattaaaccaatcaaatgacctaaattgagggaagtacggatcatcgttgtcaacaccagagtaatctctaattaagcactcaacccaatctctattattttctaaccaggagttgttagtaactccacttaaatcagaatcgactaaagagataatggcagccgttatgacatgataagagtaatgaaaatgatgatcattataataagagttaccaaagtcttggctagaagagcctgatgaaattatgcctttccaactaacgtcgtaatttaaaggtaagacttgctgattgctgatgaatctctccattgcaatagtcagtttagataataattcttttgttaaattttcatcatgaaggatgtaatgtgtcacataaagaatccacgcatactttgcaagtatcttaccagagaaatacatagaatctatgtttgattcttgttgagggtcactcaattgaacttcttgaacagcagcttcccgaattttagatagcttttcttgactgtaatctgccttcttattcaaagataacgcgacaggttcaaagcccaattcttgaggtacttgaacctgcatatcaaaactgtttgtgagataaccagtcattaagcctttaactgtggaatccaggcttgaggcaatttcacgttcctgcatttctggtgtgaatgccgctttatgatgtggtaaagcatacattagagtagttccagactgcgagtagcctgcaaccgtatagttaaatctgtaatttgtgaaatgttcatcaacagtttgccctgataggtcacagtatactggataacagcccgctgccatgtcaatactggggacggagtctgcagataattgacagataagaccattgattttatgagatgatattattgtattgctgtcgagtaatgaaatttgaaaatcttgtggaaaagagtaatcaggtgaggtcaaataaagtatccaattcctattattctcaagttgtatattatatttaccatatctttcattcacgcttatgcgctctaagctcctgaaaccaacggcgcttcttaattcaaaacccaaatcgtggtaaatagccgtgacaaagcccatcccctgaaccagcgggaattctataaactgggaactactcaaagacattagtaagcacatggacatatgtttcatatcccggaattcaagcttgatatcatttgaagagacaaattccctggccttgaatacaaatgattttatatttgtgggattgaagtagaatctgggaggatttgtagttgtatcaaaaaccctttgagacgctaaagtatgattggcggccaaaccaaacaattctggatcacgagaaaaccaaattgaataaggatgtgtccatataggttgtgtattatcgtctaataacatgtttgtgtagaacttgtttgtctccaatggatcaacagattgatcatcaatattcggctttggtaccgggtgttgaactttgttgaagacggaaggaggagcttttaagttagaaaggacaggtgattgaaaaatattgtcactattcacctggctgtcagctaaagggttagaactgcttggtgtgcgcagtgattcacctgccaccctattttctcgaggtttactggagttctcagaagaacaaactggtggctgaacatttgcgcgaggtggtaagggaggaggtcctctattggtagtaccgccaggtctattaggaacaggtggaggaatggcttgcctactgtaacacatctttttacttctcgtatttatttatttttgtttttatgatactagcacttttcagaaattcatgaattttatttatggttccaagaaaaaaacttcaaagaaatgagtactagaatgatatatccacaaaaaaaaaaagagcagaaacaaaatggatgagatggataatgtgatacgatctctggagcaagaatatcggttaatattgctcttgaaccataggaacaaaaatcaacatagagcggctagctggtatggatcgttcaatgagatgaaaagaaattgtggacaaataataacgctttttagctcgagaagattacaagccaaacgccttaaagatgttgaatgggtcaagttgcacaggctattacagagagcactttttagacagttaaagagatggtactggcagttcaatggcgtaattgcgctgggacaatttgtaacgttgggttgtacactagtaacattgctggcaaatgtgagggcactgtatatgagattatgggagattaatgaaactgagtttataagatgtggatgcttaataaagaacttaccgagaacaaaagcaaaatcggttgtgaacgatgtcgaagaacttggagaaattatagatgaagatattggcaacaacgttcaagaaaacgaactagtgataacgtctataccaaagcctctgacagagaactgtaagaagaaaaagaaaaggaaaaagaagaacaaatcagccattgatggcatattcggataaatatacaagtaaatagactttttaaaataataatatcaatgctaataaatcattcattaatgaccttgtctgcccaagtaggcaaaacaaacgcactagaatgtatttgaggattatagtacttcagcttcccttgttcttgctcagatatctttctttgcggaatgttcaacggtatattggcgttattactgcaaacaattaaacctaattggccagatgtataggttggaaccatggtatagcaatattctgtattaggaaatacctttttggctgtatttttcaaatcatgtaagtattttaaatttaaccaaaaattttcagagctttgcataataacaacgccattaggatttaaagcatctttcaatagttcgaaatacctctcttgaaaaaacgcttcagctggaccttcaggatcagaactatctgtaataatgacgtcaaatttcttatggacgtcggaagcacctatatcttgtaagaacttgaagccatcgcaaagtttcaagtccaacctttcgtcatcgaaagcaccattactcaatgtgggcaagaacttacgggataattcgatcactgatgagtcaatttctaccatagtgatatcttctacacagctgtgcttggctacttcccttaagacacctccgtccccaccgccaatgataagtacacgcttgggattagaatgcgcaaacatggcaatgtgggtgatcatctcttgataggcaaactcatcaaattccgtacattggacaataccatcgaggaccaaaacagtaccgtataccttgttacggaagattaagatgtcctgaaattcactgcgggcttcataaagtattgagtccacggtcatagtaaaggcctggcccggaaaacttttatcattaatctctctaaaccatccatctttgatgtaaggatgctgtgaattattaaccataatgtataactgaatctgtcactttatcctgcctgtctcatcggcgttttgatattttatttttaactaaaatcagcagcaacttgaaaaattttgagataaccttaaaaaggatctagcaataaagagaagctcgaagtagccatggacactgaagagaaaaaaaagactacagcgtcagtagagcatgcccggatgttgcaaaatgaaatacaacagttatttgctcagttgcgggatacgaattctcaaattcgctgcgatcttaacgagtttgaacaaataaaggaatcatctacaacagcggattcaaccacgaacagtgcgaactgataaatttatattcaaatatattttacataaacaatattaatatatatatatattccccctacaatgatgaatgcgtttctgccgtcacgtttcctattatcaccttctcttaggtcctcttattggtggcataggtcttgatgagttttttttgaataatggtgcattctttaagagatctggaacaacgataaatttgatctgtgacccacgtacgaatatttgatccatgtgtgttacagccccctggggctctgtagctattacatctcttagctgtacgttcatgctatcttcgctttcaacaagtttaccacgataagtcgctcccgttgttagctccagagaaacgatatgtccctgtgcctcatttaataatttcactggtattccattcatagtcattgtttctgatacgtgcctcgcagcgctttctgattctcttcgtattgctcttataagaattttttaacgatttcaaaaatatcaaatctatagaacgaaagaaataagaagctgccatccctagaaaagtaaaaactataaggtaccaagaagtaaaaagagaaatatagggatataatgataaaaacacgtatagaggaagttcagttacaattcctcacagggaataccgaacttacgcatttgaaagtctccaatgatcaacttatagtaacgacacaacggacaatttacagaataaatttacaagatccggccatcgtcaatcactttgactgtccattaagcaaggaactagaaactataatgaatgttcatgtttcaccaatgggtagtgtcattcttattcgaaccaactttggccggtatatgttgctaaaggatggcgaattcactcaattgaacaaaataaaaaatctcgacctcagctcgctacattggatcaacgaaaccacctttctgatgggaatcaagaagacgcccaagttgtaccgagttgaattgacaggaaaggatataaccacgaagctatggtatgaaaacaagaaactctctggtggaattgatggcattgcgtattgggagggctctctgctattaactataaaagacaacattttatactggagagacgtgacaaatatgaaatttcctttagtattaccagatgaatctgagcaatttgaaaggttaaaacatcatgcgataaagaaattcgattcgtacaatggactctttgcttgggtcacatccaatggaattgtctttggtgatttaaaagaaaagcaaatggaaaaagatcctgcttctaataattttggaaaattcctatcttcgtcgaaggttctactcaatttcgaactgcctgactaccagaatgataaagatcacctcatcaaggatatagttttgactgctttccacatcctgcttttgagaaaaaatacggtaacaatggtgagtcaattaaataacgacgtagtgtttcatgaaactataccgagacaccagttgactggctccaacactgatagtaatgagaaatttttaggcctagtaagagattcggtgaaagaaacgttttggtgtttctcaaacatcaacgtctttgaaattattatcgaaaatgagcctaattcggtatggaatttattagttcgggataacaaatttgacaaggccctatcgttgaaaggcttgacggtgagggaaatagaatctgtaaaactttcaaaggcaatgtaccttttccacactgctaaagattttcattccgcggctcaaactttgggaagcatgaaggacttgtcacactttggggaaatcgcattgaattttctccaaataaaagattacaacgatttgaacgtaatattgataaaacagttggataacgttccctggaaatcaactcaagtcgtcttgtcgagttggattatttggaattttatgaaacaattgaatgatattgaattaaagataaacacaactaagccagcttctactgatgaagacaatttgctaaactggaacctgaatctcaaggagaaatcgaatgaactaacgaaatttttggaaagccatctagaaaaacttgataatgaaaccgtttatcaaataatgtccaaacaaaaccggcaaaacgaattattgatttttgctagtctaatcaacgatatgaagtttttattatcattttggattgaccaaggaaattggtatgagtccttgaaaattctgcttacaataaataaccatgacctagtctataagtactctttgattctcttattgaattcaccagaggctactgtgtcaacgtggatgaaaatcaaagacttggatccaaataagttaattccaacaattttaaaatttttcacaaattggcaaaataattctaaactgattactaacatatcagaatatcctgaaaattactcactgacatatttgaaatggtgcgttagagaagtcccaaaaatgtgtaatccaatagtgtacaattctatcctttacatgatgattactgatccgagaaacgatatgatactagaaaatgatataatcaaattcatgaaatcaaacgaaaacaaatatgatcttaatttccagttacggttgtctttaaaattcaagaaaactaagacctcgattttccttttaacacgtttaaacttattcgaggatgccattgacttggcattgaaaaataacttgattgatgattgtaaggtaattgtgaatgacgagattcttatagaggattataaattaaggaaaagattatggctgaaaattgcaaaacacttattactttcaatgaaagacatagatataaagcaattaattcgaacgattttaaatgattccaacgaaattttaacgattaaggatcttttgccattttttaatgagtatactacaattgctaacttgaaagaagaactgatcaagtttttagagaatcacaacatgaaaatgaatgagatttcagaagacataataaactccaagaatttgaaggtggaaataaacacagaaatttctaaatttaatgagatttacaggatactagagccaggtaagtcttgtgatgaatgtggtaaatttctacagatcaaaaagttcattgttttcccctgtggccactgttttcactggaactgtataatcagggtaatactgaactcaaatgattataacttgaggcagaagacggaaaacttcttaaaggccaaaagtaagcataatttgaatgatttagaaaatatcattgtagagaaatgtggattgtgcagtgatatcaacatcaataaaattgatcagccaatatctattgatgaaacagaattagccaaatggaatgaatagtagtattcttttttagtcaggctgaaacactgaaattaaaagagggaagataaatatcattactattatctgactaaaatatgtgtcgagtatttacttacctaaatagccaagaagtaaaaaaaatgcgtatcaaaaatgaataaaacgtaaaattatcggggaaaaaccttgtattttcaaagagtaataaaacgggtgaattaaaatcacaatatatgtatggctgaagttcaacataagtcataactagagaaacttcttcttgcccatgagttaatattccacctcataattccgtaatctgtaccaataatcaaggagctcccattcctatcttcaacccaatcgatacctgatatattgttttcttctgagaattcgttactttcctgagttgtaatcactggtcttctcaaaaaattggatgtgcctctattattcctactatttgcagcaaaattgtcatcatctgacggtaagtctggcgttgaaggtggtctgagaaaactttcaaaagctcttgcggaaacaccatgatagtctgaagaaacacgatacgttgagtgaacatcattgtaagcttcataatattcatcatcttcaaaaacatcattactagcttgctggtgagaaagtattaaggggtcaattaaattttgaggtgcggaatttgacgacgaagttgcgatagaatcagcagcaggtgtgccaagacttgcgttaacattgttattagaataatcggcggttggtgccgaagtcgatactctccttaccctgaatgaacatcgtctcttgtatggatgagctacgtcacttgatgaactacctttcgtagaaaacagaaccgattcgttactaattttatccataactttcggaaaaggtagaatttgcggctccaaatacttttttgggattctttgagccatagttatccatggttctgtggttacatttggcatagagggcagcgaaaatcttcttcttgataaagaccgataatccgccccttgtaattcatttttgctatcattactttcgttttcgttgttattatttgtggtgaaattatgatttgtattatgcttccgttcgtttatatattccatattaactttatcaggaataacaataacttggtggttaacgtagtttcttgtatctacaacgtgtactctgccctgatgttcagaaatgaataataaatcatctaggccataactgaacctacagactctaaatgcaccgttgtgggaatgtggtctagtcgaactaatttctgccatgggagtagccatgtttctgatatcataaattgcgcaagtaccattttgaaataccgtcgcaaattgcaagtcgttttcggaaaaagagttataaaacccatggtctgaatttggagcttcatatatgttttcgatatattctgattcatcaggtaacgcaaaccgtggtatccgtctaacacgattgacagaactaccccaggaaggatgattatcgtaatgtaaggagaattggttggttaattcattttgattgtaaacagcaaatttattagaatcgccagacactaccatcgtttgaccatcatgtgacaaagaagcgttattcaaaggaaattttaaatccgcataacgcttcactagtgttacatctctattacttacatcgcattggtaaagatgaccatcattgttgcatgcaaaaagatcaaactgcatactggccctgtcataaagtgtgacacaattattgatgaactggcccaacgtaaaagtcatcattgtgtccgtttcttgattataaaactccacgatgcccttccagatattaggatttgaataatgtgaatttatagggaaactaatatttttggaaatattaatcggttgggaaggtggcggcaacgaaatatttgcatcttgagctaaacggttccaattagaagggaatcccttatcatcagaaccgattagaccaccacaaacagtcaacccatttaattccgtgaaacatctcggcttaaagttgaactctaccagtttctcggaaggaacatgtaaatttttggagatatacgagcccgttgtcctagaaccttttgtagacgttttttcagtagagtttttaccactgttactcggttgaatagaattatgtcgccttactggagacctcaatacggaagaatccgtatctagtactcttatcgaatgatcgtaaatataatacagtttactctggttcatggagcctggtttgatacaatcccgcaactgccaatggtttatggagaccttggcatcgtagagttctaaagcaggcatcatatagttttggtaaaccttatcagagccagtatttaaccgttcatcttgcagcgcctccttagattgccccgtgccatcaatggtcattctttaacacgtatacttttgtaacttattgctgtttttctaccactttattcgatcttacttgtcgttgcttaatcagcaaaagttttgtactagaataaagttgtaataggcttttaatccagagtctcctcctcctcactttctgatcatcaccccttattgcctcagaaaagagatcatactccgctttaaagccgttcaatgtcacgtgacacaaagttgtagccgtataacatatggcgctaccatgttgttatttagacgggtaacatcaccgtttagaaagataaaggaaagtgaaattattggaatggaaagtgttcccaaaagttcgcaccaacgcaaaaagaaatttttttttcaattttgatatcatcgttgcgtagaggaagccctaactgagtagagaaattatatggtattttccttgtaatatttgattttgagtcgatatcccctttgttcttcttccttccttcgcttgttttagttgtatacttggtttattgtggaagatttttttttctgcttcgtagttttaaattagaagttatttctttgcaaatttctcttccccccacagtattcttttagaggtgaagtagaaataaaccaagaaagcatacacattttattctcaatgtccaacccatttgatttgttaggtaacgacgtcgaagacgctgacgttgtcgttttgccaccaaaggaaatcgtcaagagcaacacttcctccaagaaggctgacgtcccacctccatccgctgacccatccaaggctagaaagaacagaccaagaccttctggtaacgagggtgctatcagagacaagaccgctggtagaagaaacaacagatcaaaggatgtcactgactctgccaccaccaagaagtccaacaccagaagggccactgaccgccactctagaactggtaagactgacaccaagaagaaggttaaccaaggttggggtgatgacaagaaggaattgagtgctgaaaaggaagctcaagccgatgctgctgctgaaattgctgaagacgctgcagaagctgaagacgctggtaagccaaagaccgctcaattgtctttgcaagactacttgaaccaacaagctaacaaccagttcaacaaggtcccagaagctaagaaggttgaattagacgctgaaagaattgaaactgctgaaaaggaagcttacgttccagcaaccaaggtcaagaacgtcaaatctaagcaattgaagaccaaggagtacttggaatttgatgccacttttgttgaatctaacactagaaagaacttcggtgacagaaacaacaacagcagaaacaacttcaacaaccgtcgtggtggtagaggcgctagaaagggtaacaacactgctaacgctactaactctgctaacaccgttcaaaagaaccgtaacattgacgtttctaacttgccatctttggcttaagccttatatatgaataattccaactgaaagaatccaataacagtgttctactttctgtttctattactattattattttaattggttatttactatataatttgcaagtgaagatgatcatgctggcaaaccaaagaataaaattgggttgacatccaatcgagaatatgacatatcattttgttttatttaagcaataaaaaataaatgacttttaatttacttttcaattttctttttttttttttcacttctgagatgtgcaagcgtgtagtttgtttgtatttgtataacaatttcatcattagtcattcttcattaaaaactttttgttatcgattaaggacatccagtatgattctttttctctcatcttgattatctcttgagagtattgttaggcaacgcattataccacagttttttttaccaaagcgagcggcactccagcaggtgcttcatgtagtattcaggtatcacatcgctatattttaagtttctgtcgccgttgatcattcctatctcccattcacttcttccgttcggttgcatctgattaccatagtcatgtagtccaactatcaaatcttcgtgccctagttctccttttaacttttcgtccattagtccattagctatacatgaaacgtcgaataatattttacatgtgagtccccacaaatccctgaatctgaaaatacctccatcaacaccgtcttcgtctgaacttgataaatcctctatggtttgcaaccatggcatttcgttattatttgctacgtgaaaatgataatgcataatcaaccattttattccaccccaattaagcttatactccttccgctcaaaatattctgcttgataactcttaacatcctcatcggcttcaggaagaagatgtataactaagtcattgagtggtacagaaaacaaagaagatgtttctccagggttcagcttaccaaaaaacttacggatatctaagggaactttgtatttatcctcatgtttttctaatttatctttgtaaagaaaacagaccattggcttaacacttaaaaatgttcttgataaatagcatggcatatccatgaccaaattgtctaatttcattccgaactccttatgcaagacctcaggatcatgcggtaacccaatctcctcttcagcttctcttctggctacgctttcaaaggtttcttgaaaataatcagctttacctccaggaaatgaaacatcacctgagaagcttctcaatgttcttgaacgtttagttaaaagcactcgtagttcgcctttcattccaatgaataatagtattattaccgccgaatttcttttgaaaggccatattgagctccgagtatatggtgttttatgaaatttgtatcttatcaagttctctattagttgctttgaactcagcatcctcctctgacttaatatcattacagcttttctgttacatgtgtgattctcttcaaatctacaatattattattgaattgttataaatatacttacgcggatccccccccacaaccctaccccaaaaaataaatacaacgaataaatacgcgattggaattcatcgctacttttgaaaaaacagaatatataagttgataataagctactcttgtatatacctattcgcctagggatataatcaaacttttaaatcgacctttaaggtatatgtaacaacaaacgccacagtgatgaaaagaatcgcatactgcatgacaaataagacggacaaacagttcatttgaatgtgatcaccacatgctggcgtataaaatgctgtgaaatatacttgagcagtagcactcggcatggaccacgttaatatcatgtcaaattttcctatgcccgtatccagccaatcgatcgaatatagtttatttacccataggacgccaataataggaatgacaattaatcgaaagcatgtcatcaataaggcggatttaataaatccaggtggcaatgacttaatttctaatcttgccaacgttccgccaagtaatagaagccccaatggaacacatgcatttccaatatactctgtaaaatccattaaaaaattcagaacaggttctccatcaggcgccttatgaacgtgaacatatgtcgttacgaagcatgctttaacccagggaattaatgcacatattattcctagtattgcccccagagatgctggcctgaggcaatttataataaagtactgcaaccatttgagattgtgtctctctataaagaaggagaggctacccctcccgtcggtggccatattagtgcaattttcttcttcgatggaactttcatcggtataaccagtgtgcacattaccaatacttgcgttcctgcttccaacttcttcagtcaaggatagtggtcttgataaatctaattcaccttgccttattttttcggcggcactgtatttggaaatcaactcattcatatccgctttcctttttcttctataacttctgccatcgctattttttgatatacgactatatgagagggaactgccatctattcgcgagaactccaatgcgcctgggcttgaataagtcgaggaaaccctatatatttcagcatgcggaaggtcactttcaaatttatgggatgcaccatttgattctttatagggtttgatgtagccagtaaaaccttcgtagaatgcctgcggtgtcatttcatttgtagtaatagagttacaagacaaatcgctattacttctcgcatcttccgattgataggcatttgtaggacgtgtgatattaggtaactttgttatttcagtaagtttgcgatcgtcgatagcgggacttactgacggagtaatattctcactatctggttcttttgtatctctaaaatcaagtccgaccactctccacattccaaaattcatcattaggaaactttgaataaataaaaaaatgcaggaataagcaacacctttatcagcttcttcagcagtaaaaatggagccgttacccatgctctgaatataggcaataggtaaatctgatatatttggaaagaaacccgcaaatatgagcccccagaagaattttttgggcacagtcgtagcaaatgtagtaaataaggcgcccgtggcacctaaaacaaacaagataaaagctgaaagtattatcactccaatctcctttatatccctccatgaaatattggacacaattttgttgaaggtcaaacaaggcaaaatagcgttaacaaccatatttgatatacctttcgcattttccatggaaacaatatcgaacttagctaccaaatagccaacaagcataatggtgtaaattttaaatataggttttaatgcaatgtaaatagcggcacccagagaaagggacatcttggttcatttattgtagtactagaaaatcgtttccaccatataaaaatgatagaccttgatcagacacatgtagaattaccgatagaagaaatactatatgagtactgtaacttgttttacctcttatacgttacacactttgatgtaaatatgactcaccttatgtaccagacattgacccaaaaatacagatatacaaaaggtgaaaaaagatatagtagttcctcgacgtatgcctacggggaaaacaatatagatggaattctataacaccgacagtgatgtttctcctgaaatttgtgccaaatagcgccgcggaaagtcggcacattttgcaacatggacttcggaggtctgatatcatcccgtaaccttctcgtaatgcatcagattctggtcatgcttgttcaatatacatcctacgtgcacaacgaacaatagctttctcggtatcttattcgattatccccgaagtttcttgaaacggcaatatccttttaccctatcccgggcgaagaaccccgtcacagtgcattactttattcccactatagggataacaggggcgattgtgtacgaataactagattgtatttagataactaagatatatgataagtgcgtaaaaatggatatatctatacatatatatcactaagtgcataaagtctttgtattttcgctttcctagctgaccagtaaaagatcttgttttttaactgatggataaatagtaatttataactgaatagagcaaaagttgggaaaatagaaaatagaaaacagaaaaggagcgaaattttatctcattacgaaatttttctcatttaagttatttctttttttgagagaaaaattggttctctacagcagaaatgatggcaggtacaacttctgggttggccaaagtagttaggtcacctagctgttcggcttcgttagaagcaacctttcttagaactcttctcataatctttcctgaccttgttcttggtagatctctaactagaataatggtttttggtgaggcgaaaggaccaatctcacccctaacttgtaagatcaattctctacgtaaattatctggtgtgatgtgttctgcatcaccttcagtagcgttgttttgtagataaccatcttttagggaaacatatgcaacgacggtttgaccggtcaattcatctggaataccgacaacagcagcttccgagacgttttcgtgatttgagatagatgcttcaatttctgatgtggataatctatgaccggaaacatttacaacgtcgtcaactctacccctgatccagtagtaaccatcatgatctctaccagcaccatcacctgtgaaatagtgaccaggataaggtttcaagtaagtatccatgtaacggtcgtggtggttccaaacagatctagccattgatggccatggtgatttaacggcaaggacaccttcgacatcattaccttctaattccacacctgtaacagggtcaatgatacaagcgttaataccaaagaatggcacggtagcagaaccaggttttgttgggacagcacctgccaaaggagcaattaaatgagaaccagactctgtttgccacatagtgtcacaaatgacacagtttttgttacccactttttcatgataccattcccataagtctggagagattggttcaccgacggaacccaagacacgtaatgaggaagtgtcatatttggcaatttcggcttcacctacacgtttgattaatcttaaagcagttggagccacatagaaatgggtagccttgtgacgttggataattctccaatatctaccataatctgggtaggcaggagtggattcgaaaattattgaggcggtacccaaggttaatggaccatatagagcataggtgtgacccgtgatccagccgacgtcaccggcagtgaagagaacatcttctgggtgaatatcaaaaacgtatctagttgttaaagcggcacctaataaataaccacctgtagtgtgaacgacaccctttggagaaccagtggaaccggaagtgtataataaaaatagaggatcttcagcgtcacatgaaacaggaggtaggtaagttctctgcttagcggcctcctcatgccaccagtaatctctaccggccttcattggaataccttcagtaccagttctttggaaaaccaagatacgggaaaccaaatcgactccgttcaaaccttcgtcaacaatttttttagtgttgatggtcttaccacctcttttaccttcatcacaagtgatgaccactttagaattagcgtcaacgacacgatctttcaacgaaccagcggagaacccagcaaagacaacagagtgaatagcaccaatacgagccacagccaacatagcaatgaccgcttctggaatcattggcaaatagatagccactgtgtcacctttcttaacgccccagctttttaagacaccagcgatttgggaaacttttctgagtaattcaccaaatgtgatgattttgttgtcggattcgtcatcagcttcatagatcaaagctggcttgtcgggattagcaaaggcatgtctgtcaacacaattgtatgatgcattcaatttaccgttcaaaaaccatgcaacatcaccattgttcaatgaaccagattgaactttggtgtatggagcatcccaatgcaagtattccttagccatcttatcaaagaatttttctggctcattgatagattgttgatacatttcttgataatgttgcatatcagtaacgtaacccttgccgggttggctgttgtaaaaatgttgaggagccttaagagcctttacgttgtgagcttcataaactactttatgttccttgattgtcatattttattattgtattgatttactttcctgtattctgtttgtgtataacaatcactaaccgcggagacacacaattcggaattcgaatactatatatatatatattttaaggtagaggtatatataaggtttgatcaggctaaacgtgcggtgcgatatcgttgctaaaattcagaacactgttttcaatctcgaagtaaaaaacgataaaaattatcaacaaaaccagtgacgaagaagttcagtcacgaaacttttttgcctcgttcaaaaaaaaaaagccagcggaatcggctaccgaatatcggcaataacgcttcggccccgggaaacgcatatgaataattttaagttagttttatgctatacagcgggtggctacgtgtaatgtatttaatgtttatatttactgatttatgacatcgatgagggagatcaattcttgcaatcgcgccaattcgttgcgatcagtgccctctctttcgtaattattcactgaaactatcttgccagttattgtgtttcccgagaggatggcgccattactgaaggtattactagttgtgttatcgctactggaaggcgtcgcagacttttccctcttcagttccttgccacgaaagtaaatagtatcttcgaatttgtaatccttaaactcttcggttggtccttgatactcggtatagaaaggcatgaagctcacggtgtaagcatctagattcacggcatctttggtcattgcgtatttgacctacttactgtattagtacacacttgtattttcgggccttgatggttttgtttcactgcttgtttgcaattggttgttgttcctaacgcgttttgtcatttttcgatgaaggtcgaacggaaagaactaaaaaagactaggggaatggaatgcggaatagcagtgcatatttcaggatgaatggaaaaacacatctgcagcaacaatgaaaaaccttagtggatttaaacttctcacaggaaatatcgatcaaagcaatgggctagccaaataaaaaaaaaactgtaggcacaaaaagcagcatacgtcattcgcaaaaaagaaggtcctacccggattcgaaccggggttgtccggatcaaaaccgaaagtgataaccactacactataggaccggaacttcttgatgatacgaacgattaaaattgttgacgttctcttctttttttcatatttgagtagatctgatgcgcaatgtctatacaacctggcagacaattgtctaaataatattttgtaggaataagagtccactatcgtctatcaactagtagtcacactaccaatatattatcatatacggtgttaagatgatggcataaggtatgagaaactgtcatcgaagctgaaatgcaaggattgatagtgtaataggataatgaaacatataaaacgaaaagagaaataatcataacattatttcctagagtagcgattccccttcgcgtattcttacatcttcgaagagaacttctggtgtaagtataataaatattatagctctatcgaatggtgcaattatttaccaaattctcaataggaatccataatactacatacgatactaatattctagtatttttatacttattatttcttttttattacaccagcaatcgttgcaaattatcttctgatagaatttctgagggtatcctaaacttatgccattttcttggactgtaaatcatacttggatgttgtgcattagtcaataatcggttcttgttccaacgattacatgtaaatgaagggagaaataattatggtaaatcatgcggcggtccttttggtgatgcagtatccatagtcactacataacaatcttagtcaccttgtattgattcaccacataatcctgcagagcccgctatgtccttaatctgcgcgataactctcctacccctgaattttgagagcgccatagcaaaccgataaagctggcacaattaaaggtatcggtgttgtcagaattaggtgcctcctgcttttttttttttcctgctcttatatccgttatatccgaatgatttttatcgcttgtttaaaaaatactttcccgatatatatatatagtctccctttaaatttgtttccggtaagtttttaacaccaataaatgaaaagaaatgactacggtgatgaatatgagccgcgcattgaatcaggttatgtaagtatcagaacccctaattatgatgtcactcttacccttcgatggctaagcggcgactgggatgccgggaaaagctctacaaatctactaaaaaagtcaaatatacagctgtaaacttctttcctcgtctacatcatggtaacgattgttcaatctttacttcgtgtctttttttttttctatgtactttctattccaacctatgtgaagactaaaattcaccttagtaaacgtaaagacaatgacgataggtgcctaaatccaatgaaaagagcacaaacagtttccatataattaggagcagtctacaatcaagcagtaaattttggtatcataaacgacccgctgagacctttccattgggtcaggtcgagaactgtagttactcgaaaatcagatcatccacacgctgttgaactcgaaaacagtagcactgtcactgtaagctagtgttcattttaaacgtcttgccgaattttttcttcgaagaaaagtattgcaatggactctatacttctgagcagcaattaaggaaaacagggtaggtaacctctggggttgatatctggataaactggaaccatattagcgagatgatgcactttacatagattccgcgagtaccttaatactgctggtgcaccacgataatgattacttcttcaatatcaattagtttgccaggatataccttatccaatttagcgtgacgatcttaaaggcgtttttatgtttattcgctaaaacccttcttattgtcattttcgttaacatactatctaacgtatttctgtttgtcagtaattttcagttaatggatggtatcagacgaaaattaaataaatcaccttctgctttataagcaagatataaaaaaaaatatggatcgattgattcatttccataatgatcaatatataataataataggactgctagctaatatatactcaatatgatttgttcatattcttcgcaggtatatataaccatcaagtaatacatatttaacttagctgcatcaccgttgagccttttgttgaacacttcccctctctatcataaaatcaaccatatagaaacgcatagagtgtaaacattgatatgcgatgccaaaacacttgatttgttactatggaacacacagcaatatgcatacactacttgttccattgctgttgcaattccattggatagaactcctgcattgtcctcatttagtgctcaggaaaaggtttacatatttctttctgacttttcagaaaaaaaatttgtgaggctgtcactgtatatcacgtaatacacatataagtaattggatttatagtaaaaagaattctcatgttgggcacaactatctcgttgccaaattttttaccatattaaaacgacccatgtaatataattggaaaaattagtatactgggaacaatcttgcggcacaccgcttgaacgaaacgttcgtaaaaatatttataattcttattattattatttattattattataatatatataatttaataatcttaatatttattatcattgtttcatatttttttttataaatatttatttaaataaaaaatattaaagagtattcaaaaaagtcttactgtgggtaatggatatttcctcatgtttgccgctctgatggtgcggaaaaaactgctccatgaagcaaactgtccgggcaaatcctttcacgctcgggaagctttgtgaaagcccttctctttcaacccatctttgcaacgaaaaaaaaaaaaaaaataaaaaataaaaagaccaaatagtaaatagtaacttacatacattagtaaatggtacactcttacacactatcatcctcatcgtatattataatagatatatacaatacatgtttttacccggatcatagaattcttaagacaaataaaatttatagagacttgttcagtctacttctctctaaactaggccccggctcctgccagtacccacttagaaagaaataaaaaacaaatcagacaacaaaggcttaatctcagcagatcgtaacaacaaggctactctactgcttacaataccccgttgtacatctaagtcgtatacaaatgatttatccccacgcaaaatgacattgcaattcgccagcaagcacccaaggcctttccgccaagtgcaccgttgctagcctgctatggttcagcgacgccacaaggacgccttattcgtatccatctatattgtgtggagcaaagaaatcaccgcgttctagcatggattctgacttagaggcgttcagccataatccagcggatggtagcttcgcggcaatgcctgatcagacagccgcaaaaaccaattatccgaatgaactgttcctctcgtactaagttcaattactattgcggtaacattcatcagtagggtaaaactaacctgtctcacgacggtctaaacccagctcacgttccctattagtgggtgaacaatccaacgcttaccgaattctgcttcggtatgataggaagagccgacatcgaagaatcaaaaagcaatgtcgctatgaacgcttgactgccacaagccagttatccctgtggtaacttttctggcacctctagcctcaaattccgagggactaaaggatcgataggccacactttcatggtttgtattcacactgaaaatcaaaatcaagggggcttttacccttttgttctactggagatttctgttctccatgagccccccttaggacatctgcgttatcgtttaacagatgtgccgccccagccaaactccccacctgacaatgtcttcaacccggatcagccccgaatgggaccttgaatgctagaacgtggaaaatgaattccagctccgcttcattgaataagtaaagaaactataaaggtagtggtatttcactggcgccgaagctcccacttattctacaccctctatgtctcttcacaatgtcaaactagagtcaagctcaacagggtcttctttccccgctgattctgccaagcccgttcccttggctgtggtttcgctagatagtagatagggacagtgggaatctcgttaatccattcatgcgcgtcactaattagatgacgaggcatttggctaccttaagagagtcatagttactcccgccgtttacccgcgcttggttgaatttcttcactttgacattcagagcactgggcagaaatcacattgcgtcaacatcactttctgaccatcgcaatgctatgttttaattagacagtcagattccccttgtccgtaccagttctaagttgatcgttaattgtagcaagcgacggtctacaagagacctaccaaggccgtctacaacaaggcacgcaagtagtccgcctagcagagcaagccccaccaagcagtccacaagcacgcccgctgcgtctgaccaaggccctcactacccgacccttagagccaatccttatcccgaagttacggatctattttgccgacttcccttatctacattattctatcaactagaggctgttcaccttggagacctgctgcggttatcagtacgacctggcatgaaaactattccttcctgtggattttcacgggccgtcacaagcgcaccggagccagcaaaggtgctggcctcttccagccataagaccccatctccggataaaccaattccggggtgataagctgttaagaagaaaagataactcctcccagggctcgcgccgacgtctccacattcagttacgttaccgtgaagaatccatatccaggttccggaatcttaaccggattccctttcgatggtggcctgcataaaatcaggcctttgaaacggagcttccccatctcttaggatcgactaacccacgtccaactgctgttgacgtggaacctttccccacttcagtcttcaaagttctcatttgaatatttgctactaccaccaagatctgcactagaggccgttcgacccgaccttacggtctaggcttcgtcactgacctccacgcctgcctactcgtcagggcatcatatcaaccctgacggtagagtataggtaacacgcttgagcgccatccattttcagggctagttcattcggccggtgagttgttacacactccttagcggattccgacttccatggccaccgtccggctgtctagatgaactaacaccttttgtggtgtctgatgagcgtgtattccggcaccttaactctacgttcggttcatcccgcatcgccagttctgcttaccaaaaatggcccactaaaagctcttcattcaaatgtccacgttcaattaagtaacaaggacttcttacatatttaaagtttgagaataggtcaaggtcatttcgaccccggaacctctaatcattcgctttacctcataaaactgatacgagcttctgctatcctgagggaaacttcggcaggaaccagctactagatggttcgattagtctttcgcccctatacccaaattcgacgatcgatttgcacgtcagaaccgctacgagcctccaccagagtttcctctggcttcaccctattcaggcatagttcaccatctttcgggtcccaacagctatgctcttactcaaatccatccgaagacatcaggatcggtcgattgtgcacctcttgcgaggccccaacctacgttcactttcattacgcgtatgggttttacacccaaacactcgcatagacgttagactccttggtccgtgtttcaagacgggcggcatataaccattatgccagcatccttgacttacgtcgcagtcctcagtcccagctggcagtattcccacaggctataatacttaccgaggcaagctacattcctatggatttatcctgccaccaaaactgatgctggcccagtgaaatgcgagattcccctacccacaaggagcagagggcacaaaacaccatgtctgatcaaatgcccttccctttcaacaatttcacgtactttttcactctcttttcaaagttcttttcatctttccatcactgtacttgttcgctatcggtctctcgccaatatttagctttagatggaatttaccacccacttagagctgcattcccaaacaactcgactcttcgaaggcactttacaaagaaccgcactcctcgccacacgggattctcaccctctatgacgtcctgttccaaggaacatagacaaggaacggccccaaagttgccctctccaaattacaactcgggcaccgaaggtaccagatttcaaatttgagcttttgccgcttcactcgccgttactaaggcaatcccggttggtttcttttcctccgcttattgatatgcttaagttcagcgggtactcctacctgatttgaggtcaaactttaagaacattgttcgcctagacgctctcttcttatcgataacgttccaatacgctcagtataaaaaaagattagccgcagttggtaaaacctaaaacgaccgtacttgcattatacctcaagcacgcagagaaacctctctttggaaaaaaaacatccaatgaaaaggccagcaatttcaagttaactccaaagagtatcactcactaccaaacagaatgtttgagaaggaaatgacgctcaaacaggcatgccccctggaataccaaggggcgcaatgtgcgttcaaagattcgatgattcacggaattctgcaattcacattacgtatcgcatttcgctgcgttcttcatcgatgcgagaaccaagagatccgttgttgaaagtttttaatattttaaaatttccagttacgaaaattcttgtttttgacaaaaatttaatgaatagataaaattgtttgtgtttgttacctctgggccccgattgctcgaatgcccaaagaaaaagttgcaaagatatgaaaactccacagtgtgttgtattgaaacggttttaattgtcctataacaaaagcacagaaatctctcaccgtttggaatagcaagaaagaaacttacaagcctagcaagaccgcgcacttaagcgcaggcccggctggactctccatctcttgtcttcttgcccagtaaaagctctcatgctcttgccaaaacaaaaaaatccattttcaaaattattaaatttctttaatgatccttccgcaggttcacctacggaaaccttgttacgacttttagttcctctaaatgaccaagtttgtccaaattctccgctctgagatggagttgcccccttctctaagcagatcctgaggcctcactaagccattcaatcggtactagcgacgggcggtgtgtacaaagggcagggacgtaatcaacgcaagctgatgacttgcgcttactaggaattcctcgttgaagagcaataattacaatgctctatccccagcacgacggagtttcacaagattaccaagacctctcggccaaggttagactcgctggctccgtcagtgtagcgcgcgtgcggcccagaacgtctaagggcatcacagacctgttattgcctcaaacttccatcggcttgaaaccgatagtccctctaagaagtggataaccagcaaatgctagcaccactatttagtaggttaaggtctcgttcgttatcgcaattaagcagacaaatcactccaccaactaagaacggccatgcaccaccacccacaaaatcaagaaagagctctcaatctgtcaatccttattgtgtctggacctggtgagtttccccgtgttgagtcaaattaagccgcaggctccactcctggtggtgcccttccgtcaattcctttaagtttcagccttgcgaccatactccccccagaacccaaagactttgatttctcgtaaggtgccgagtgggtcattaaaaaaacaccacccgatccctagtcggcatagtttatggttaagactacgacggtatctgatcatcttcgatcccctaactttcgttcttgattaatgaaaacgtccttggcaaatgctttcgcagtagttagtcttcaataaatccaagaatttcacctctgacaattgaatactgatgcccccgaccgtccctattaatcattacgatggtcctagaaaccaacaaaatagaaccaaacgtcctattctattattccatgctaatatattcgagcaatacgcctgctttgaacactctaattttttcaaagtaaaagtcctggttcgccaagagccacaaggactcaaggttagccagaaggaaaggccccgttggaaatccagtacacgaaaaaatcggaccggccaaccgggcccaaagttcaactacgagctttttaactgcaacaactttaatatacgctattggagctggaattaccgcggctgctggcaccagacttgccctccaattgttcctcgttaaggtatttacattgtactcattccaattacaagacccgaatgggccctgtatcgttatttattgtcactacctccctgaattaggattgggtaatttgcgcgcctgctgccttccttggatgtggtagccgtttctcaggctccctctccggaatcgaacccttattccccgttacccgttgaaaccatggtaggccactatcctaccatcgaaagttgatagggcagaaatttgaatgaaccatcgccagcacaaggccatgcgattcgaaaagttattatgaatcatcaaagagtccgaagacattgattttttatctaataaatacatctcttccaaagggtcgagattttaagcatgtattagctctagaattaccacagttataccatgtagtaaaggaactatcaaataaacgataactgatttaatgagccattcgcagtttcactgtataaattgcttatacttagacatgcatggcttaatctttgagacaagcatatgactactggcaggatcaaccagataactatcttaaaagaagaagcaacaagcagtaaaaaagaaagaaaccgaaatctctttttttttttcccacctattccctcttgctagaagatacttattgagtttggaaacagctgaaattccagaaaaattgctttttcaggtctctctgctgccggaaatgctctctgttcaaaaagcttttacactcttgaccagcgcactccgtcaccataccatagcactctttgagtttcctctaatcaggttccaccaaacagataccccggtgtttcacggaatggtacgtttgatatcgctgatttgagaggaggttacacttgaagaatcacagtcttgcgaccggctattcaacaaggcattcccccaagtttgaattctttgaaatagattgctattagctagtaatccaccaaatccttcgctgctcaccaatggaatcgcaagatgcccacgatgagactgttcaggttaaacgcaaaagaaacacactctgggaatttcttcccaaattgtatctctcaatacgcatcaacccatgtcaattaaacacgctgtatagagactaggcagatctgacgatcacctagcgactctctccaccgtttgacgaggccatttacaaaaacataacgaacgacaagcctactcgaattcgtttccaaactcttttcgaacttgtcttcaactgctttcgcatgaagtacctcccaactacttttcctcacacttgtactccatgactaaaccccccctcccattacaaactaaaatcttacttttattttcttttgccctctctgtcgctctgccttaactacgtatttctcgccgagaaaaacttcaatttaagctattctccaaaaatcttagcgtatattttttttccaaagtgacaggtgccccgggtaacccagttcctcactattttttactgcggaagcggaagcggaaaatacggaaacgcgcgggaacatacaaaacatacaaaatatacctttctcacacaagaaatatatgctacttgcaaaatatcataccaaaaaacttttcacaaccgaaaccaaaaccaacggatatcatacattacactaccaccattcaaactttactactatcctcccttcagtttccctttttctgcctttttcggtgacggaaatacgcttcagagaccctaaagggaaatccatgccataacaggaaagtaacatcccaatgcggactataccaccccaccacactcctaccaataacggtaactattctatgttttcttactcctatgtctattcatctttcatctgactacctaatactatgcaaaaatgtaaaatcatcacacaaaacataaacaatcaaaatcagccatttccgcaccttttcctctgtccactttcaaccgtccctccaaatgtaaaatggcctatcggaatacattttctacatcctaactactataaaacaacctttagacttacgtttgctactctcatggtctcaatactgccgccgacattctgtcccacatactaaatctcttcccgtcattatcgcccgcatccggtgccgtaaatgcaaaacaaataccatctatgtcttccacaccatcattttactatgcctgccaccatccatttgtcttttgcaccatatcttcataacctgtcaccttgaaactacctctgcatgccacctaccgaccaactttcatgttctgtttcgacctacctcttgtaaatgacaaatcacctttttcatcgtatgcaccttattctccacatcacaatgcactattgcttttgctttttcacctgtcatatcctattgctattagatgaaatataataaaaattgtcctccacccataacacctctcactcccacctactgaacatgtctggaccctgccctcatatcacctgcgtttccgttaaactatcggttgcggccatatctaccagaaagcaccgtttcccgtccgatcaactgtagttaagctggtaagagcctgaccgagtagtgtagtgggtgaccatacgcgaaactcaggtgctgcaatctttatttctttttttttttttttttttttttttttttctagtttcttggcttcctatgctaaatcccataactaacctaccattcgattcagaaaaattcgcactatccagctgcactcttcttctgaagagttaagcactccattatgctcattgggttgctactacttgatatgtacaaacaatattctcctccgatattcctacaaaaaaaaaaaaaaaaacactccggttttgttctcttccctccatttccctctcttctacggttaatactttcctcttcgtctttttctacaccctcgtttagttgcttcttattccttcccgctttcctgcactaacattttgccgcattacactatatgatcgtagtacatcttacaactccgcataccgcgtcgccgcgtcgccgcgtcgccaaaaatttacttcgccaaccattccatatctgttaagtatacatgtatatattgcactggctattcatcttgcacttttcctctttcttcttcccagtagcctcatccttttacgctgcctctctggaacttgccatcatcattccctagaaactgccatttacttaaaaaaaaaaaaaaaaaaaaaatgtccccactgttcactgttcactgttcacttgtctcttacatctttcttggtaaaatcgtagttcgtagtattttttttcatatcaaaggcatgtcctgttaactataggaaatgagcttttctcaattctctaaacttatacaagcactcatgtttgccgctctgatggtgcggaaaaaactgctccatgaagcaaactgtccgggcaaatcctttcacgctcgggaagctttgtgaaagcccttctctttcaacccatctttgcaacgaaaaaaaaaaaaaaaataaaaaataaaaagaccaaatagtaaatagtaacttacatacattagtaaatggtacactcttacacactatcatcctcatcgtatattataatagatatatacaatacatgtttttacccggatcatagaattcttaagacaaataaaatttatagagacttgttcagtctacttctctctaaactaggccccggctcctgccagtacccacttagaaagaaataaaaaacaaatcagacaacaaaggcttaatctcagcagatcgtaacaacaaggctactctactgcttacaataccccgttgtacatctaagtcgtatacaaatgatttatccccacgcaaaatgacattgcaattcgccagcaagcacccaaggcctttccgccaagtgcaccgttgctagcctgctatggttcagcgacgccacaaggacgccttattcgtatccatctatattgtgtggagcaaagaaatcaccgcgttctagcatggattctgacttagaggcgttcagccataatccagcggatggtagcttcgcggcaatgcctgatcagacagccgcaaaaaccaattatccgaatgaactgttcctctcgtactaagttcaattactattgcggtaacattcatcagtagggtaaaactaacctgtctcacgacggtctaaacccagctcacgttccctattagtgggtgaacaatccaacgcttaccgaattctgcttcggtatgataggaagagccgacatcgaagaatcaaaaagcaatgtcgctatgaacgcttgactgccacaagccagttatccctgtggtaacttttctggcacctctagcctcaaattccgagggactaaaggatcgataggccacactttcatggtttgtattcacactgaaaatcaaaatcaagggggcttttacccttttgttctactggagatttctgttctccatgagccccccttaggacatctgcgttatcgtttaacagatgtgccgccccagccaaactccccacctgacaatgtcttcaacccggatcagccccgaatgggaccttgaatgctagaacgtggaaaatgaattccagctccgcttcattgaataagtaaagaaactataaaggtagtggtatttcactggcgccgaagctcccacttattctacaccctctatgtctcttcacaatgtcaaactagagtcaagctcaacagggtcttctttccccgctgattctgccaagcccgttcccttggctgtggtttcgctagatagtagatagggacagtgggaatctcgttaatccattcatgcgcgtcactaattagatgacgaggcatttggctaccttaagagagtcatagttactcccgccgtttacccgcgcttggttgaatttcttcactttgacattcagagcactgggcagaaatcacattgcgtcaacatcactttctgaccatcgcaatgctatgttttaattagacagtcagattccccttgtccgtaccagttctaagttgatcgttaattgtagcaagcgacggtctacaagagacctaccaaggccgtctacaacaaggcacgcaagtagtccgcctagcagagcaagccccaccaagcagtccacaagcacgcccgctgcgtctgaccaaggccctcactacccgacccttagagccaatccttatcccgaagttacggatctattttgccgacttcccttatctacattattctatcaactagaggctgttcaccttggagacctgctgcggttatcagtacgacctggcatgaaaactattccttcctgtggattttcacgggccgtcacaagcgcaccggagccagcaaaggtgctggcctcttccagccataagaccccatctccggataaaccaattccggggtgataagctgttaagaagaaaagataactcctcccagggctcgcgccgacgtctccacattcagttacgttaccgtgaagaatccatatccaggttccggaatcttaaccggattccctttcgatggtggcctgcataaaatcaggcctttgaaacggagcttccccatctcttaggatcgactaacccacgtccaactgctgttgacgtggaacctttccccacttcagtcttcaaagttctcatttgaatatttgctactaccaccaagatctgcactagaggccgttcgacccgaccttacggtctaggcttcgtcactgacctccacgcctgcctactcgtcagggcatcatatcaaccctgacggtagagtataggtaacacgcttgagcgccatccattttcagggctagttcattcggccggtgagttgttacacactccttagcggattccgacttccatggccaccgtccggctgtctagatgaactaacaccttttgtggtgtctgatgagcgtgtattccggcaccttaactctacgttcggttcatcccgcatcgccagttctgcttaccaaaaatggcccactaaaagctcttcattcaaatgtccacgttcaattaagtaacaaggacttcttacatatttaaagtttgagaataggtcaaggtcatttcgaccccggaacctctaatcattcgctttacctcataaaactgatacgagcttctgctatcctgagggaaacttcggcaggaaccagctactagatggttcgattagtctttcgcccctatacccaaattcgacgatcgatttgcacgtcagaaccgctacgagcctccaccagagtttcctctggcttcaccctattcaggcatagttcaccatctttcgggtcccaacagctatgctcttactcaaatccatccgaagacatcaggatcggtcgattgtgcacctcttgcgaggccccaacctacgttcactttcattacgcgtatgggttttacacccaaacactcgcatagacgttagactccttggtccgtgtttcaagacgggcggcatataaccattatgccagcatccttgacttacgtcgcagtcctcagtcccagctggcagtattcccacaggctataatacttaccgaggcaagctacattcctatggatttatcctgccaccaaaactgatgctggcccagtgaaatgcgagattcccctacccacaaggagcagagggcacaaaacaccatgtctgatcaaatgcccttccctttcaacaatttcacgtactttttcactctcttttcaaagttcttttcatctttccatcactgtacttgttcgctatcggtctctcgccaatatttagctttagatggaatttaccacccacttagagctgcattcccaaacaactcgactcttcgaaggcactttacaaagaaccgcactcctcgccacacgggattctcaccctctatgacgtcctgttccaaggaacatagacaaggaacggccccaaagttgccctctccaaattacaactcgggcaccgaaggtaccagatttcaaatttgagcttttgccgcttcactcgccgttactaaggcaatcccggttggtttcttttcctccgcttattgatatgcttaagttcagcgggtactcctacctgatttgaggtcaaactttaagaacattgttcgcctagacgctctcttcttatcgataacgttccaatacgctcagtataaaaaaagattagccgcagttggtaaaacctaaaacgaccgtacttgcattatacctcaagcacgcagagaaacctctctttggaaaaaaaacatccaatgaaaaggccagcaatttcaagttaactccaaagagtatcactcactaccaaacagaatgtttgagaaggaaatgacgctcaaacaggcatgccccctggaataccaaggggcgcaatgtgcgttcaaagattcgatgattcacggaattctgcaattcacattacgtatcgcatttcgctgcgttcttcatcgatgcgagaaccaagagatccgttgttgaaagtttttaatattttaaaatttccagttacgaaaattcttgtttttgacaaaaatttaatgaatagataaaattgtttgtgtttgttacctctgggccccgattgctcgaatgcccaaagaaaaagttgcaaagatatgaaaactccacagtgtgttgtattgaaacggttttaattgtcctataacaaaagcacagaaatctctcaccgtttggaatagcaagaaagaaacttacaagcctagcaagaccgcgcacttaagcgcaggcccggctggactctccatctcttgtcttcttgcccagtaaaagctctcatgctcttgccaaaacaaaaaaatccattttcaaaattattaaatttctttaatgatccttccgcaggttcacctacggaaaccttgttacgacttttagttcctctaaatgaccaagtttgtccaaattctccgctctgagatggagttgcccccttctctaagcagatcctgaggcctcactaagccattcaatcggtactagcgacgggcggtgtgtacaaagggcagggacgtaatcaacgcaagctgatgacttgcgcttactaggaattcctcgttgaagagcaataattacaatgctctatccccagcacgacggagtttcacaagattaccaagacctctcggccaaggttagactcgctggctccgtcagtgtagcgcgcgtgcggcccagaacgtctaagggcatcacagacctgttattgcctcaaacttccatcggcttgaaaccgatagtccctctaagaagtggataaccagcaaatgctagcaccactatttagtaggttaaggtctcgttcgttatcgcaattaagcagacaaatcactccaccaactaagaacggccatgcaccaccacccacaaaatcaagaaagagctctcaatctgtcaatccttattgtgtctggacctggtgagtttccccgtgttgagtcaaattaagccgcaggctccactcctggtggtgcccttccgtcaattcctttaagtttcagccttgcgaccatactccccccagaacccaaagactttgatttctcgtaaggtgccgagtgggtcattaaaaaaacaccacccgatccctagtcggcatagtttatggttaagactacgacggtatctgatcatcttcgatcccctaactttcgttcttgattaatgaaaacgtccttggcaaatgctttcgcagtagttagtcttcaataaatccaagaatttcacctctgacaattgaatactgatgcccccgaccgtccctattaatcattacgatggtcctagaaaccaacaaaatagaaccaaacgtcctattctattattccatgctaatatattcgagcaatacgcctgctttgaacactctaattttttcaaagtaaaagtcctggttcgccaagagccacaaggactcaaggttagccagaaggaaaggccccgttggaaatccagtacacgaaaaaatcggaccggccaaccgggcccaaagttcaactacgagctttttaactgcaacaactttaatatacgctattggagctggaattaccgcggctgctggcaccagacttgccctccaattgttcctcgttaaggtatttacattgtactcattccaattacaagacccgaatgggccctgtatcgttatttattgtcactacctccctgaattaggattgggtaatttgcgcgcctgctgccttccttggatgtggtagccgtttctcaggctccctctccggaatcgaacccttattccccgttacccgttgaaaccatggtaggccactatcctaccatcgaaagttgatagggcagaaatttgaatgaaccatcgccagcacaaggccatgcgattcgaaaagttattatgaatcatcaaagagtccgaagacattgattttttatctaataaatacatctcttccaaagggtcgagattttaagcatgtattagctctagaattaccacagttataccatgtagtaaaggaactatcaaataaacgataactgatttaatgagccattcgcagtttcactgtataaattgcttatacttagacatgcatggcttaatctttgagacaagcatatgactactggcaggatcaaccagataactatcttaaaagaagaagcaacaagcagtaaaaaagaaagaaaccgaaatctctttttttttttcccacctattccctcttgctagaagatacttattgagtttggaaacagctgaaattccagaaaaattgctttttcaggtctctctgctgccggaaatgctctctgttcaaaaagcttttacactcttgaccagcgcactccgtcaccataccatagcactctttgagtttcctctaatcaggttccaccaaacagataccccggtgtttcacggaatggtacgtttgatatcgctgatttgagaggaggttacacttgaagaatcacagtcttgcgaccggctattcaacaaggcattcccccaagtttgaattctttgaaatagattgctattagctagtaatccaccaaatccttcgctgctcaccaatggaatcgcaagatgcccacgatgagactgttcaggttaaacgcaaaagaaacacactctgggaatttcttcccaaattgtatctctcaatacgcatcaacccatgtcaattaaacacgctgtatagagactaggcagatctgacgatcacctagcgactctctccaccgtttgacgaggccatttacaaaaacataacgaacgacaagcctactcgaattcgtttccaaactcttttcgaacttgtcttcaactgctttcgcatgaagtacctcccaactacttttcctcacacttgtactccatgactaaaccccccctcccattacaaactaaaatcttacttttattttcttttgccctctctgtcgctctgccttaactacgtatttctcgccgagaaaaacttcaatttaagctattctccaaaaatcttagcgtatattttttttccaaagtgacaggtgccccgggtaacccagttcctcactattttttactgcggaagcggaagcggaaaatacggaaacgcgcgggaacatacaaaacatacaaaatatacctttctcacacaagaaatatatgctacttgcaaaatatcataccaaaaaacttttcacaaccgaaaccaaaaccaacggatatcatacattacactaccaccattcaaactttactactatcctcccttcagtttccctttttctgcctttttcggtgacggaaatacgcttcagagaccctaaagggaaatccatgccataacaggaaagtaacatcccaatgcggactataccaccccaccacactcctaccaataacggtaactattctatgttttcttactcctatgtctattcatctttcatctgactacctaatactatgcaaaaatgtaaaatcatcacacaaaacataaacaatcaaaatcagccatttccgcaccttttcctctgtccactttcaaccgtccctccaaatgtaaaatggcctatcggaatacattttctacatcctaactactataaaacaacctttagacttacgtttgctactctcatggtctcaatactgccgccgacattctgtcccacatactaaatctcttcccgtcattatcgcccgcatccggtgccgtaaatgcaaaacaaataccatctatgtcttccacaccatcattttactatgcctgccaccatccatttgtcttttgcaccatatcttcataacctgtcaccttgaaactacctctgcatgccacctaccgaccaactttcatgttctgtttcgacctacctcttgtaaatgacaaatcacctttttcatcgtatgcaccttattctccacatcacaatgcactattgcttttgctttttcacctgtcatatcctattgctattagatgaaatataataaaaattgtcctccacccataacacctctcactcccacctactgaacatgtctggaccctgccctcatatcacctgcgtttccgttaaactatcggttgcggccatatctaccagaaagcaccgtttcccgtccgatcaactgtagttaagctggtaagagcctgaccgagtagtgtagtgggtgaccatacgcgaaactcaggtgctgcagttgttttttttttcgcgcacgaatacatcacgcagcctcgccttgacactgctcaagggataaggggaaggagctgagatagaactgagttggagcgttgcagcggcacgagcagtgaaaagagcgaagagaagagaagcagataaaagaccaaagtagcgatgatacttcgatgtttggagcgatttttcctatgtgaatattagaaatcatatgttttgtatcagctgaacagtgaatgatgtgctcaatactcaaattcatctttttgtttgctaaaaatagcttaactggcacatcatgaaaaggatgtagaaattatagagtatatttactactaagaactatataaaaacacagtgtgatgaaaagtcactgatcaggctttaaccaccgtagacgccagaaaaaacagacctaatctgatccatgccgtagccggagtacaaacataattgtagcaaaatacgcgatttttgagggtttaggtagccagatccaatggcgtactctggggcatcatctggaggaactgtaccatctgctgttcttctgctgtgaacaattggtataccatactcttcataaagttgttcgtttacaatactacccgtagcagtccaggaaccagctccagaacccgccaacacgataccttttgcgcccaggtccttgacggcctttactattagctcaggattcaagccttgataggagtacagaataatgacttctggaatttccgaagggtctgtgaggttggaaatgtcaaaaaattgccatccatttggcttgactggtgggtagtaaaactccacgtcatcatttgaaaagtaacctaaatatccctgttcatccgctctgaatgtatctaaagagttggcattcattttcgttgtccaaaacccagaggcaatacgatcgtttagagtgatcatcgtgccacgacccagtgatttctcagaagcagcaatagacactgcttgatataaattcattgggccatcagcagacgtggcagtggctggacgcatagcgcctgcgatacatactggcttctctgaatttatggtcaaatctaagaagaaagctgtctcctccatagtgtcggtcccatgagtgacaaccgcaccagcgtagtcatcagaggctagtgcctcggagataccgtgatacaatgggatcagatgcgtatagtttaaagaatttgaaccaacgttagacacttgaagatagtccagatttgccttctcagctaaagatgggacggcttctattaaatcatttacggttaatcccacgctataacccgccgttgttgcacttgtcgaacccttggaagcgatagtaccgccggtaccaaaaattttgattgatggcaaagaagaattcttctcttcacgaatttttagtagtggagcaccactggacattgcgacaaagagagaaagtaaaagggtatttaaagatctcatagttggaggttggtgagtaccagattgcttacaaaagaatagcgagccaacatttgctctgcctcaggcctcttggtgctgcttgaagactcatcttatatggcttttgtatgtcatgatttgttcttgtacattatgtgttgatattaaacaaattgatttttttttttttgcgatagcaagcagataatgaaagagacaaggacttggaacatccgataagactgcgccgatatcgatcttacagtccttcccttgtgtcatgactttcggaaaagcatcctcgtcgactggtagtttgctgtctgtcacgtgctgaagggtctgatacatttttttaaagataagagacggggtttacccttcggaggactaagcgagatctccaagtaaagatctcgcttatcaagaaagcagccaagtgtggaacgtccttttttttggtttcaaaaagatattcaacagtttacactgcagctttaattgcctcaaaaggatatcatgaggtgatctagggtcagaagggaaagattacagcatcttgagttgaatcacatctgcaaaaggtggtattattgacgttgctcttccttaatggaaactcatggggtttggaaaggaggtgcggtaatctatttttttcgaacacaaaacctaaccttgaaaagaaactgtccaatttcattgaacttacctcagaacgggccggagtctttgctttcagtctaacatggtctaatttcttcgaaaagcttcatttaattgttagactgtggttttacaaggaaaaaaccagtgctatactgaagcgatacccagaactaattaccttgtgtgacgattcggctcagcgaaacggacatggtaaaattgggaatttgaaagcaggcagcagccttgtacagcgacatgacgataggtttagaatccccatcacgtacgagttgaagaattctacgaaggctctatgcgttattcctctatcggtataaagtgtagcgttgtaggggggatattggtggtttagttgaatttgcgcaacgaaattatagaactcataaaagttcaattcaatacttgaaacccttaacgttggttcgaccatcaattgtttggacataatagttttattctgcggccgatttcaaaatttagtaaatcaaatgttgaagcatcaccagtaggatgaccactcccatgacaaaactccgtcccaaagatagcttgatcatcctaagcgggtcgcattttactatccccagttccgaagaataacaaggctcaatgcatatgctgtttatcgtgctcacaaggcggtatgacgtttttagcaatgtaattatattaaaaagatcttcagtcactatgagtggttgattgccccatagagagctataagccgacgtgaaagctgctggttccagcttggctcatgtcgtcaccagtcactagtcacttggtcgcattcattgctactcatctgcgagtgagcatatttgagatctgacttgccaagggattagaatcacgtaagactcttgatccttagaagatatttctgacaaagaaccacctaagccatgcaagttttttttttcatttggtggcgaaacaaaggtgatgaaagtttcttcttgtacaaacgccaatcccgataggtgagacaattcttgaagtaatggacctctgagtaagcatatcagtcgaatgaagttccaatatgcgttggccaaggaacagctaggcagcaactcgcgcagtggcgtcaaaaaactaataagtaaacaccactggcttccggaatactatttctctgatctctcattttctgttgtacagcagtgggacagtagagccattgaaaaaactacaatcatatcttgtatgcggcccgcaaaccaagagatttatcctttgagacattgtgagaccctccgttcgcaaccgtgctctctgttttcatcactatatgcacgctctttccaaagctcctgcactttgcacgtggcggagccatcgcccggcttccatatgtacggctgccacacctaactatttcggttgcggccatatctaccagaaagcaccgtttcccgtccgatcaactgtagttaagctggtaagagcctgaccgagtagtgtagtgggtgaccatacgcgaaactcaggtgctgcagttgttttttttttcgcgcacgaatacatcacgcagcctcgccttgacactgctcaagggataaggggaaggagctgagatagaactgagttggagcgttgcagcggcacgagcagtgaaaagagcgaagagaagagaagcagataaaagaccaaagtagcgatgatacttcgatgtttggagcgatttttcctatgtgaatattagaaatcatatgttttgtatcagctgaacagtgaatgatgtgctcaatactcaaattcatctttttgtttgctaaaaatagcttaactggcacatcatgaaaaggatgtagaaattatagagtatatttactactaagaactatataaaaacacagtgtgatgaaaagtcactgatcaggctttaaccaccgtagacgccagaaaaaacagacctaatctgatccatgccgtagccggagtacaaacataattgtagcaaaatacgcgatttttgagggtttaggtagccagatccaatggcgtactctggggcatcatctggaggaactgtaccatctgctgttcttctgctgtgaacaattggtataccatactcttcataaagttgttcgtttacaatactacccgtagcagtccaggaaccagctccagaacccgccaacacgataccttttgcgcccaggtccttgacggcctttactattagctcaggattcaagccttgataggagtacagaataatgacttctggaatttccgaagggtctgtgaggttggaaatgtcaaaaaattgccatccatttggcttgactggtgggtagtaaaactccacgtcatcatttgaaaagtaacctaaatatccctgttcatccgctctgaatgtatctaaagagttggcattcattttcgttgtccaaaacccagaggcaatacgatcgtttagagtgatcatcgtgccacgacccagtgatttctcagaagcagcaatagacactgcttgatataaattcattgggccatcagcagacgtggcagtggctggacgcatagcgcctgcgatacatactggcttctctgaatttatggtcaaatctaagaagaaagctgtctcctccatagtgtcggtcccatgagtgacaaccgcaccagcgtagtcatcagaggctagtgcctcggagataccgtgatacaatgggatcagatgcgtatagtttaaagaatttgaaccaacgttagacacttgaagatagtccagatttgccttctcagctaaagatgggacggcttctattaaatcatttacggttaatcccacgctataacccgccgttgttgcacttgtcgaacccttggaagcgatagtaccgccggtaccaaaaattttgattgatggcaaagaagaattcttctcttcacgaatttttagtagtggagcaccactggacattgcgacaaagagagaaagtaaaagggtatttaaagatctcatagttggaggttggtgagtaccagattgcttacaaaagaatagcgagccaacatttgctctgcctcaggcctcttggtgctgcttgaagactcatcttatatggcttttgtatgtcatgatttgttcttgtacattatgtgttgatattaaacaaattgatttttttttttttgcgatagcaagcagataatgaaagagacaaggacttggaacatccgataagactgcgccgatatcgatcttacagtccttcccttgtgtcatgactttcggaaaagcatcctcgtcgactggtagtttgctgtctgtcacgtgctgaagggtctgatacatttttttaaagataagagacggggtttaccttcggaggactaagcgagatctccaagtaaagatctcgcttatcaagaaagcagccaagtgtggaacgtccttttttttggtttcaaaaagatattcaacagtttacactgcagctttaattgcctcaaaaggatatcatgaggtgatctagggtcagaagggaaagattacagcatcttgagttgaatcacatctgcaaaaggtggtattattgacgttgctcttccttaatggaaactcatggggtttggaaaggaggtgcggtaatctatttttttcgaacacaaaacctaaccttgaaaagaaactgtccaatttcattgaacttacctcagaacgggccggagtctttgctttcagtctaacatggtctaatttcttcgaaaagcttcatttaattgttagactgtggttttacaaggaaaaaaccagtgctatactgaagcgatacccagaactaattaccttgtgtgacgattcggctcagcgaaacggacatggtaaaattgggaatttgaaagcaggcagcagccttgtacagcgacatgacgataggtttagaatccccatcacgtacgagttgaagaattctacgaaggctctatgcgttattcctctatcggtataaagtgtagcgttgtaggggggatattggtggtttagttgaatttgcgcaacgaaattatagaactcataaaagttcaattcaatacttgaaacccttaacgttggttcgaccatcaattgtttggacataatagttttattctgcggccgatttcaaaatttagtaaatcaaatgttgaagcatcaccagtaggatgaccactcccatgacaaaactccgtcccaaagatagcttgatcatcctaagcgggtcgcattttactatccccagttccgaagaataacaaggctcaatgcatatgctgtttatcgtgctcacaaggcggtatgacgtttttagcaatgtaattatattaaaaagatcttcagtcactatgagtggttgattgccccatagagagctataagccgacgtgaaagctgctggttccagcttggctcatgtcgtcaccagtcactagtcacttggtcgcattcattgctactcatctgcgagtgagcatatttgagatctgacttgccaagggattagaatcacgtaagactcttgatccttagaagatatttctgacaaagaaccacctaagccatgcaagttttttttttcatttggtggcgaaacaaaggtgatgaaagtttcttcttgtacaaacgccaagcccgataggtgagacaattcttgaagtaatggacctctgagtaagcatatcagtcgaatgaagttccaatatgcgttggccaaggaacagctaggcagcaactcgcgcagtggcgtcaaaaaactaataagtaaacaccactggcttccggaatactatttctctgatctctcattttctgttgtacagcagtgggacagtagagccattgaaaaaactacaatcatatcttgtatgcggcccgcaaaccaagagatttatcctttgtgagaaatgggtgaatgttgagataattgttgggattccattgttgataaaggctataatattaggtatacagaatatactagaagttctcctcgaggatataggaatcctcaaaatggaatctatatttctacatactaatattacgattattcctcattccgttttatatgtttatattcattgatcctattacattatcaatccttgcgtttcagcttccactaatttagatgactatttctcatcatttgcgtcatcttctaacaccgtatatgataatatactagtaatgtaaatactagttagtagatgatagttgatttctattccaacataccacccataatgtaatagatctaatgaatccatttgttagttaatagtttaaatgtttttatcggaagaggttttgtcatcacatcagcaatgttcttcttggtctcgatgtagtatacgtataaattattacctgatacttcatctctaagtctcattgcctttgtgccaaaaaatctgtttctaaatttctcttcatttgtagacttaattatactgatcgttgatctactatcagtaagtaagcctttaataattggtttcttgttaagttcttgtatcaggtaacttagattatttaataatgggacagattcacttatcgcgtgtatttctgcttccgtagttgaagtacatgttaatgaagccttggtggactttcctccaattacctttccattaagtaaatatatgttgccaatttgtgatttataatacggttggttgccatacgaagcatcacttattgcgactagtttattatctggctcggtaggtttgtttttgtgccatatcagttgtttatctctagtgtcccacatgaattgtatcaactcatatgtcatgtctaaaacttgcctagaggggaatagtatatgttgagcaagtgtgttgatgtagtatagtaagtcaaatctaaatttatatccaacatatgaagctagaccaatcaacttttgcatttcatgtaccttctctttgtattcatcttcatctatttctagttcatcctggtctatataaagacctggttgacctggagcgctaagttttcttccttttggattcaaaggtacgtttaatttgggtattttctcagttaatgagttttccatacctaatttcatgtatttacctctttgatatttgatttctaagccaagtatgtcgtactgaatttcgttatcactttcacccagatttattatctttgtatcgtattgtttcttgagtgttgttatgattttcttatttgcatttaagtctttgctgaataaaatcatgtcgtcaacaaataaacatattgttacttgactattcttaaatacgcatgaccatccacgaacttcttccataccacactgttttatcaggtatgatttgatagtttcgtaccagttcgctccactttgtttcaatccataaagtgatttcttcaaacgtatcaacttatcattcattcctaaatgtggtggaggtcttatgtataattcttctttgatgtctgcatacaaatatgccgaagatatgtctaattgtgtaatatagtagttattgtctaatgcaagtgacagggatgtcattaatgcatagtgatgtacggtattggattgcatgcctgagtcgtaagtgtcaggatgctgaatatcacctcttgcaacaaatctagctttatgagtaccgtcacgtttcttgttgaagataaacattgagtttattactcttttagggtctatttcttttctgtcataatattcgtcagtgtcccaagttttcatcttcaacagttgattgacttctttgtggtatgcctcgatatatttttctttttctttaatatctttattataggtgattgcctcatcgtatcgtaaggttgtccgtattggtttgattgattttactgcttttacagctgcaatcaggtgaattcgtttcttcgatctcggaggttctaaactacgcatattcttagtattccatgtgtctcgtgataccttaatttcagtttcattatcttctaatgatcttttcttactgttgatagtagtataggcattagagtcaccaataccacccaaactggaattagtttgacgagaatttatcggtgggagttctttaaatgggtcagggaattcggtaggagattctggaggtagatcagggagtgggagatcagcgatgatagattcctcggtattctgttcagaaacagtagttggcgttttgataggaacaatattgtgcgatgaattattttccggtggagaagcatcgattgaaggtgaacggtgtataatccttttctcagtctcttggtcacttatctgcggaacagttttgttgttggtaccacccgtactggatattggtacgtttgtatgattagtctcattttcactgtacgagtctgagtgtctgaaatctttagatttactggcgtgcgacgactcatgtgtgttagattgggacatgggagcaagtaaaggaacatttaatttatgcataccacccgaaccggtactctcgatattggaaatttggggggtgctagatctcttctttgatggaagaatattagattcagatatgttggggtcaacttctctgggtgcgcgaatattggttttagaaacacgtttcgaatcttcagtatgagttgacggaggtgtggaatcggttggactcacagcttttgaaaggacatttctcggttgctcaggatgtagttcaatgtcggattggaagtcatggtcagattctatgttaagatcattggattcttggatctcatttgacgcaatgaacgaatgatatgaagcagttaaacggtttaagtcttcatcgaaagtgagtgcgtcgtaattgaattgatctaatctggattccttgccctgaagaataacatagttagttgtatctactgtcttctttaaggatggaagatagatgatatatccataagagtttcgagacggatgtagagcgtagcctgggatgccacgaggatgtattttggagttagggttgtgatcattgacgataacaggttgaccgaaaggtaacaaagtactgatatcaagtcctgccaagccagcatgttgtcttgcagattttttgcttttaggtgaagctagtgaatttctcacaatagtagaaaattcgattgcagagaaccataaatggttcggtaaaccactacattgcagttgagtacggcagtcatctaataaggtacggttgagccgttcagcgactccatgtgctcgggaatccgctgtggttgtatagcatggagttataccatttttttcaaggaatttatggagagttctgttagtatactcagaaccacggtccatttgtataaccaagacactggcctgaaactggttcttaataaaagctagtatcgtagtaaaaacatcgaggatagagtcctcgcgacggtcgtgtaatggataaacccaacggaattttgttgtctcatcagtaaatgagatgaaataggatggtgcactatttggtaggttgtgaactggaccaaatatgtcagtatgtaggtattgaaagggttcgtatgaattttggtattttagtcgtgaacctttgatatgtctgtgtttggtgcttttgccgattaaacaatcaggacattgatagtcaatagcactagaccagtcgacatctgattcgttaaaatacgtgatggtgttatttttaagtgagtatcgaattgtcggtgcattggcatgcgcaagcattcgatgaatgaaaggataaggatatttgcgtgtactttcacttgtatggacattattgatggtgggtacggagatatttgatggaagcaagtactttttagatacccagtaaaagtctccatattttacgataggtgcaagtacagtgccgtcagatcgttctaagacgtttttggtaaagcatgctgtgatatctactgcagccaattcattcaaactgagtaagtcataggctatgttaggagtgtgcaatacctttattgatgttttggtgttgtcctggaagtgaaattgtaggtcaccaatagcgttaattggtatatttcttttttgagcatcaactacgtttatgtcaggattagatgatgctgagtgtatgtgatgagcagatcttataagggttcgtgatgctcctgaatcgagaaggaggtgtccagggagttcatcatcagaatgattagtgtgatttaccgtagattcagtaagttcctggcctaaggtgaaggtcgtgcttattgttcaattgaatcggttcagtagttgatttactgatggaatcgttgtccgtgctgggagagttattagatgtggatacattgtgagccctggctgttttcgatttcgaattatttgttttttgaggattccgagctataactttgggtttggttgtattcgtatagctgcgagaatcattcttctcatcactcagatttctcctgtaattaggtttgctgtttctcgatccctgttgttcttcataaatagcatggatatctaagaacagttcagcgactgtcatatttagatgtcgatgacgtgtgtagcgtaaaaatttatattcgccagatagacctctcataattaattggcatgcgaccttgttattgatatgaatgccattattgttcagtctgtcgataatgtttgtgacttttgtttcaaatgcatctgcaggtgtactgccattatattgcaaatttgccagggtcacaatgtcgtttgcctcttgggtatcagattgcattttttcaatacttttggaaagaattttcatgatatccgtataatcaacggataggatgtctttgacccaggtaggtaggaattgagagggagcaaatatttgaaaagtgttatacaagaaggtgagttcatcatcagtgatctgacgtacgggttttccgtttactgtcggaataataccaccgagattcgagttttgtaaaaatttgatgtatgttttaacccaatttggaaagtcattaggtgaggttaacattggtggtggtctgacatattttttagtggatgtcatatcagagtccgctgaggatgaatcagtaaatgtattacctgactcaggtgatggagtgctcagaggcgttccaactgatgatggatactgcggaaactgtgattgtggcccaggtggaaagtacataggcgacatttgataaggtgtatacggaatcatagatgggtgtccgtaaaatgaccaaccagatggattggcttggttttgggtcatcatgcactgctgtgggtacggcccattctgtggaggtggtactgaagcaggttgaggagaggcatgatgggggttctctggaacagctgatgaagcaggtgttgttgtctgttgagagttagccttagtggaagccttctcacattcttctgttttggaagctgaaacgtctaacggatcttgatttgtgtggacttccttagaagtaaccgaagcacaggcgctaccatgagaaatgggtgaatgttgagataattgttgggattccattgttgataaaggctataatattaggtatacagaatatactagaagttctcctcgaggatataggaatcctcaaaatggaatctatatttctacatactaatattacgattattcctcattccgttttatatgtttatattcattgatcctattacattatcaatccttgcgtttcagcttccactaatttagatgactatttctcatcatttgcgtcatcttctaacaccgtatatgataatatactagtaatgtaaatactagttagtagatgatagttgatttctattccaacactttgagacattgtgagaccctccgttcgcaaccgtgctctctgttttcatcactatatgcacgctctttccaaagctcctgcactttgcacgtggcggagccatcgcccggcttccatatgtacggctgccacacctaactatttcggttgcggccatatctaccagaaagcaccgtttcccgtccgatcaactgtagttaagctggtaagagcctgaccgagtagtgtagtgggtgaccatacgcgaaactcaggtgctgcagttgttttttttttcgcgcacgaatacatcacgcagcctcgccttgacactgctcaagggataaggggaaggagctgagatagaactgagttggagcgttgcagcggcacgagcagtgaaaagagcgaagagaagagaagcagataaaagaccaaagtagcgatgatacttcgatgtttggagcgatttttcctatgtgaatattagaaatcatatgttttgtatcagctgaacagtgaatgatgtgctcaatactcaaattcatctttttgtttgctaaaaatagcttaactggcacatcatgaaaaggatgtagaaattatagagtatatttactactaagaactatataaaaacacagtgtgatgaaaagtcactgatcaggctttaaccaccgtagacgccagaaaaaacagacctaatctgatccatgccgtagccggagtacaaacataattgtagcaaaatacgcgatttttgagggtttaggtagccagatccaatggcgtactctggggcatcatctggaggaactgtaccatctgctgttcttctgctgtgaacaattggtataccatactcttcataaagttgttcgtttacaatactacccgtagcagtccaggaaccagctccagaacccgccaacacgataccttttgcgcccaggtccttgacggcctttactattagctcaggattcaagccttgataggagtacagaataatgacttctggaatttccgaagggtctgtgaggttggaaatgtcaaaaaattgccatccatttggcttgactggtgggtagtaaaactccacgtcatcatttgaaaagtaacctaaatatccctgttcatccgctctgaatgtatctaaagagttggcattcattttcgttgtccaaaacccagaggcaatacgatcgtttagagtgatcatcgtgccacgacccagtgatttctcagaagcagcaatagacactgcttgatataaattcattgggccatcagcagacgtggcagtggctggacgcatagcgcctgcgatacatactggcttctctgaatttatggtcaaatctaagaagaaagctgtctcctccatagtgtcggtcccatgagtgacaaccgcaccagcgtagtcatcagaggctagtgcctcggagataccgtgatacaatgggatcagatgcgtatagtttaaagaatttgaaccaacgttagacacttgaagatagtccagatttgccttctcagctaaagatgggacggcttctattaaatcatttacggttaatcccacgctataacccgccgttgttgcacttgtcgaacccttggaagcgatagtaccgccggtaccaaaaattttgattgatggcaaagaagaattcttctcttcacgaatttttagtagtggagcaccactggacattgcgacaaagagagaaagtaaaagggtatttaaagatctcatagttggaggttggtgagtaccagattgcttacaaaagaatagcgagccaacatttgctctgcctcaggcctcttggtgctgcttgaagactcatcttatatggcttttgtatgtcatgatttgttcttgtacattatgtgttgatattaaacaaattgatttttttttttttgcgatagcaagcagataatgaaagagacaaggacttggaacatccgataagactgcgccgatatcgatcttacagtccttcccttgtgtcatgactttcggaaaagcatcctcgtcgactggtagtttgctgtctgtcacgtgctgaagggtctgatacatttttttaaagataagagacggggtttacccttcggaggactaagcgagatctccaagtaaagatctcgcttatcaagaaagcagccaagtgtggaacgtccttttttttggtttcaaaaagatattcaacagtttacactgcagctttaattgcctcaaaaggatatcatgaggtgatctagggtcagaagggaaagattacagcatcttgagttgaatcacatctgcaaaaggtggtattattgacgttgctcttccttaatggaaactcatggggtttggaaaggaggtgcggtaatctatttttttcgaacacaaaacctaaccttgaaaagaaactgtccaatttcattgaacttacctcagaacgggccggagtctttgctttcagtctaacatggtctaatttcttcgaaaagcttcatttaattgttagactgtggttttacaaggaaaaaaccagtgctatactgaagcgatacccagaactaattaccttgtgtgacgattcggctcagcgaaacggacatggtaaaattgggaatttgaaagcaggcagcagccttgtacagcgacatgacgataggtttagaatccccatcacgtacgagttgaagaattctacgaaggctctatgcgttattcctctatcggtataaagtgtagcgttgtaggggggatattggtggtttagttgaatttgcgcaacgaaattatagaactcataaaagttcaattcaatacttgaaacccttaacgttggttcgaccatcaattgtttggacataatagttttattctgcggccgatttcaaaatttagtaaatcaaatgttgaagcatcaccagtaggatgaccactcccatgacaaaactccgtcccaaagatagcttgatcatcctaagcgggtcgcattttactatccccagttccgaagaataacaaggctcaatgcatatgctgtttatcgtgctcacaaggcggtatgacgtttttagcaatgtaattatattaaaaagatcttcagtcactatgagtggttgattgccccatagagagctataagccgacgtgaaagctgctggttccagcttggctcatgtcgtcaccagtcactagtcacttggtcgcattcattgctactcatctgcgagtgagcatatttgagatctgacttgccaagggattagaatcacgtaagactcttgatccttagaagatatttctgacaaagaaccacctaagccatgcaagttttttttttcatttggtggcgaaacaaaggtgatgaaagtttcttcttgtacaaacgccaagcccgataggtgagacaattcttgaagtaatggacctctgagtaagcatatcagtcgaatgaagttccaatatgcgttggccaaggaacagctaggcagcaactcgcgcagtggcgtcaaaaaactaataagtaaacaccactggcttccggaatactatttctctgatctctcattttctgttgtacagcagtgggacagtagagccattgaaaaaactacaatcatatcttgtatgcggcccgcaaaccaagagatttatcctttgagacattgtgagaccctccgttcgcaaccgtgctctctgttttcatcactatatgcacgctctttccaaagctcctgcactttgcacgtggcggagccatcgcccggcttccatatgtacggctgccacacctaactatttcggttgcggccatatctaccagaaagcaccgtttcccgtccgatcaactgtagttaagctggtaagagcctgaccgagtagtgtagtgggtgaccatacgcgaaactcaggtgctgcagttgttttttttttcgcgcacgaatacatcacgcagcctcgccttgacactgctcaagggataaggggaaggagctgagatagaactgagttggagcgttgcagcggcacgagcagtgaaaagagcgaagagaagagaagcagataaaagaccaaagtagcgatgatacttcgatgtttggagcgatttttcctatgtgaatattagaaatcatatgttttgtatcagctgaacagtgaatgatgtgctcaatactcaaattcatctttttgtttgctaaaaatagcttaactggcacatcatgaaaaggatgtagaaattatagagtatatttactactaagaactatataaaaacacagtgtgatgaaaagtcactgatcaggctttaaccaccgtagacgccagaaaaaacagacctaatctgatccatgccgtagccggagtacaaacataattgtagcaaaatacgcgatttttgagggtttaggtagccagatccaatggcgtactctggggcatcatctggaggaactgtaccatctgctgttcttctgctgtgaacaattggtataccatactcttcataaagttgttcgtttacaatactacccgtagcagtccaggaaccagctccagaacccgccaacacgataccttttgcgcccaggtccttgacggcctttactattagctcaggattcaagccttgataggagtacagaataatgacttctggaatttccgaagggtctgtgaggttggaaatgtcaaaaaattgccatccatttggcttgactggtgggtagtaaaactccacgtcatcatttgaaaagtaacctaaatatccctgttcatccgctctgaatgtatctaaagagttggcattcattttcgttgtccaaaacccagaggcaatacgatcgtttagagtgatcatcgtgccacgacccagtgatttctcagaagcagcaatagacactgcttgatataaattcattgggccatcagcagacgtggcagtggctggacgcatagcgcctgcgatacatactggcttctctgaatttatggtcaaatctaagaagaaagctgtctcctccatagtgtcggtcccatgagtgacaaccgcaccagcgtagtcatcagaggctagtgcctcggagataccgtgatacaatgggatcagatgcgtatagtttaaagaatttgaaccaacgttagacacttgaagatagtccagatttgccttctcagctaaagatgggacggcttctattaaatcatttacggttaatcccacgctataacccgccgttgttgcacttgtcgaacccttggaagcgatagtaccgccggtaccaaaaattttgattgatggcaaagaagaattcttctcttcacgaatttttagtagtggagcaccactggacattgcgacaaagagagaaagtaaaagggtatttaaagatctcatagttggaggttggtgagtaccagattgcttacaaaagaatagcgagccaacatttgctctgcctcaggcctcttggtgctgcttgaagactcatcttatatggcttttgtatgtcatgatttgttcttgtacattatgtgttgatattaaacaaattgatttttttttttttgcgatagcaagcagataatgaaagagacaaggacttggaacatccgataagactgcgccgatatcgatcttacagtccttcccttgtgtcatgactttcggaaaagcatcctcgtcgactggtagtttgctgtctgtcacgtgctgaagggtctgatacatttttttaaagataagagacggggtttacccttcggaggactaagcgagatctccaagtaaagatctcgcttatcaagaaagcagccaagtgtggaacgtccttttttttggtttcaaaaagatattcaacagtttacactgcagctttaattgcctcaaaaggatatcatgaggtgatctagggtcagaagggaaagattacagcatcttgagttgaatcacatctgcaaaaggtggtattattgacgttgctcttccttaatggaaactcatggggtttggaaaggaggtgcggtaatctatttttttcgaacacaaaacctaaccttgaaaagaaactgtccaatttcattgaacttacctcagaacgggccggagtctttgctttcagtctaacatggtctaatttcttcgaaaagcttcatttaattgttagactgtggttttacaaggaaaaaaccagtgctatactgaagcgatacccagaactaattaccttgtgtgacgattcggctcagcgaaacggacatggtaaaattgggaatttgaaagcaggcagcagccttgtacagcgacatgacgataggtttagaatccccatcacgtacgagttgaagaattctacgaaggctctatgcgttattcctctatcggtataaagtgtagcgttgtaggggggatattggtggtttagttgaatttgcgcaacgaaattatagaactcataaaagttcaattcaatacttgaaacccttaacgttggttcgaccatcaattgtttggacataatagttttattctgcggccgatttcaaaatttagtaaatcaaatgttgaagcatcaccagtaggatgaccactcccatgacaaaactccgtcccaaagatagcttgatcatcctaagcgggtcgcattttactatccccagttccgaagaataacaaggctcaatgcatatgctgtttatcgtgctcacaaggcggtatgacgtttttagcaatgtaattatattaaaaagatcttcagtcactatgagtggttgattgccccatagagagctataagccgacgtgaaagctgctggttccagcttggctcatgtcgtcaccagtcactagtcacttggtcgcattcattgctactcatctgcgagtgagcatatttgagatctgacttgccaagggattagaatcacgtaagactcttgatccttagaagatatttctgacaaagaaccacctaagccatgcaagttttttttttcatttggtggcgaaacaaaggtgatgaaagtttcttcttgtacaaacgccaagcccgataggtgagacaattcttgaagtaatggacctctgagtaagcatatcagtcgaatgaagttccaatatgcgttggccaaggaacagctaggcagcaactcgcgcagtggcgtcaaaaaactaataagtaaacaccactggcttccggaatactatttctctgatctctcattttctgttgtacagcagtgggacagtagagccattgaaaaaactacaatcatatcttgtatgcggcccgcaaaccaagagatttatcctttgagacattgtgagaccctccgttcgcaaccgtgctctctgttttcatcactatatgcacgctctttccaaagctcctgcactttgcacgtggcggagccatcgcccggcttccatatgtacggctgccacacctaactatttcggttgcggccatatctaccagaaagcaccgtttcccgtccgatcaactgtagttaagctggtaagagcctgaccgagtagtgtagtgggtgaccatacgcgaaactcaggtgctgcaatcttttttttttttccgcgcgcaagcacgttacccggaccccgtcttagcacacgcacacgcacacgcagcgctcacagaccagcgaaacagacctgagagccacgatgcagcacacgcttacccggaccgcctctctgccagaacgctcgagcagcgcccacagcgccgctactgcgttacccgcacttcgccgcccgccagacagctgcgagactctcgtcccgctactgtgtatcttttggttcgtcttcgttagtatgagcccgctcccgccggctcgtgccaacaaatcagacaacaaaggcttaatctcagcagatcgtaacaacaaggctactctactgcttacaataccccgttgtacatccaagtcgtatacaaatgatttatccccactcaaaatgacattgctatccgccggcaagcacccaaggcctttccgccaagagcaccgttgctagcctgctatggttcagcgacgccacaaggacgccttattcgtatccatctatattgtgtggagcaaagaaatcaccgcgttctagcatggattctgacttagaggcgttcagccataatccagcggatggtagcttcgcggcaatgcctgatcagacagccgcaaaaaccaattatccgaatgaactgttcctctcgtactaagttcaattactattgcggtaacattcatcagtagggtaaaactaacctgtctcacgacggtctaaacccagctcacgttccctattagtgggtgaacaatccaacgcttaccgaattctgcttcggtatgataggaagagccgacatcgaagaatcaaaaagcaatgtcgctatgaacgcttgactgccacaagccagttatccctgtggtaacttttctggcacctctagcctcaaattccgagggactaaaggatcgataggccacactttcatggtttgtattcacactgaaaatcaaaatcaaggggacttttacccttttgttctactggagatttctgttctccatgagtcccccttaggacatctgcgttatcgtttaacagatgtgccgccccagccaaactctcctggcgaaatttattgtttttacataaactgtattatgaacagaaggtagtagtgcattagaggtattacatatcacgtgatgtttatttctttttacctatatatggattgaatattagagttaccctacgttcaatttctagattctatggtgttacccctgatgagttctgcatctgtcctatctacctattttaccgttttggacgaatattaaagggcgggtaacacaaatactgtctgcgtaatcaatctttttaggactaattaagggtagttccatagttattagaatcgtatttctcgaattgaatttccttccctatgataaacttctacactggaaggtcatcattattttttgttaagtactttacgaatgagaaggtagtttatcagcttatatttcaggtccgttgactttttctggctacagttgttttcaactggtgctgctgcaggatataggaagtcgaagatttatttttttgcacagcttaatgttcctggcgaaaaagcagcgaaatcgagaggtatttactgctcagagatatgaagaggtaggtacatattcattggcagatattctacaatgcaattattatgacccaatcacacagtattgtgctgacctccattgagcgatgactaaaaaaacttttagtagcacgtttattattgctttcccttgctgctataagggaaaattcagtaaataataccgaagatataatggtgtttatcagatcagtgtgatgtgttcagctaaatggaaagctacagatgctatctgatcgagatattgcaagaaaaggtctcacagtatttttttcacgtgcttttttttcaaggcaatgaccaatatgaaacgatcgatgagcatagtaaacagtattatctggataattctgtatgcaatggtaacggataacttaaaatctttatgttaagtatatacaattgcatcacttttttttttttggcttgtggcttatattaacaaatttattgtgcattttttgcaatctgaagggctgctttaatattgaatacgggaagggccctttcacaccccactataagtgcagttttaggaagaaagtattaatgtatccttcaaaaaagaaaatacacgtgctgttaatataccgacatcgtgttttggggaatgggtactagagccgccgatatctattcatattttttatgtagcaacatctcatttgaacaagaatttattgacatagaactttatacaagtatgaagagaaattagaaattagcagagatgtgaaatgaacttactaataaatcggcgtggtcattggttcagtttttcttcgatataggatacattagggacagtggatgtatttcctagggcaaccattgaaactggtttgttttgtaatctgtaatttgcccacataataatatcatccttagtgattttatcaacctgctcgaaaacttcttctggtgataatcttttacctgtggtcaccacttgtctgcctatatcttctacaatggctgtcgatccatccaacgatagcaacagagctgcctttagctgagcttttgccctattcacctctgcatccgatattttgccagattttattctcttccactctttcaggatctcattaacaattaactgcacgttatgctcattagaatcagttactatgtacattccccacagacctgaatcagcgtaagaggtggaaaatgacatataagaattagccaaagaaccattttgacttgctgcaacagctaatggagagggggagtttgtacctgtgccaatggctctgtcccagttaccaacaatcgcttgtgttgccagagctacaaaataatcaggtgcagaccatgacacgccttctaatgcgatagcaatatgtgttgtaggtaacgtgttttctttgataaacctttcacctctacaaaaaactggtaatgggccccttggtgatcccaacgggacaggcgattcagatttgggcacatggccaaagtatttttgagcatactgtaccaatttttcatgatcaacagcgcccgcacctgccaataccattctgtcgcctttatagttcttggttatatagtctttcaaatcagttcttgttattgattttatgttttttataggacccagaatggttcttcctaaaggttggtccttatacgtaatctcatgaagatggtcaaaaacaacttcatcatacatcttgtccacctcttcactttctctgatgatgacatccctttctctctcaatagcactattatctaaaactgacttagtcaaaatatcacttagaatatcaacagcctttgggatatcttcttgtagggacttagcataataaactgtgttttctcttgatgtatatgcattcaaatgagatccgatattttcaatttccaattcaattccttgttgtgacctattctgagtacccttgaaagccaagtgttctagaaaatgcgctgtaccattgttttttacgttttctgccctagaaccagcatcgacaaatattccaacagtagccgaagatgtgttggggatgtactctgtggcaattgtcaacccattaggaagtttagaggttctggttcctggaatttgtgaggaaattgtacttaaaagcctccgtgtattacggaacttggatgctgttcttgaaaacattgtatgatcacctatcactttgcgcactagtttgatgcctgagagcaagatatcatgatttatccatagcgttcaaattcacttcttattactaaagagatgagtccagctcgattacgaatatcactaaatacgtgaaaataatattggtcatctaatctgtgcactgaacagtagtatcacccattgttggctgagaaattaagctcagcattttagctttcctcactacgtgttgaggaatttaatacgtaaatatagtcttagtaaagccgtgcattttacttcttaactcctttggacgggatcaagtttaaggagaataaaaccctgattcgcaccttcaacgcggctctaacatggtactatcagactctcacatccagattggagtacccttatccgaagtaacgattttttattacggtttaagataataagggacgcgtatgataactaaaaatcgtcagttgaagggcgctggccataggtatcccttaattttgacgtcgaatttcatagaagcaaacctatatattttcagtccccagtggacagaccgtttatcagttctaatgaatcagcaacgattctcaaaaaggttgccccaattcttaggaaagtaggaatgtcatcgactaagtttttgaaaccactctgcagaataagggcttttcatacttcaattgccagatcctttaccattccttttctgccaaagattccacagaaacctggaggtgtgagtgggaccgcaaatgattcctcttatatgccgcccgaaagcagagctcagggttcgtaccattggattgtcgagcgcggactgtccttagcggttcttccgctgatcgcagttcccttggtcactacaggccctatttccacttttaccgacacatttctttccttggtcctgctaggtcattgtcatatcggatttcagtcttgcattatagactatatttctgaaagagtctatggaaaggtacatcattacgcgatgtatttattgagcttgggctcctttttatcgttcgtcggtatatataaattagagagtcaagaagctggtcttattgcctctttaaaatcattatgggataacaaacctgtggaaaaaaagaggcagtaatcatcaattaatcaatatggtttggttagtggtgactaccttttttattctcgttatatatgtgtattagaaataatttaataaccgattatttattgcttattttactggtcccagttttccaacaggacttcttttatgggcaaagtgaactcaccctcttcattgacgtattttcttgaccaaagttggccagtattattgtgttccataggtatcaagtgcgttttagtttgcaggccaattttcgttattatgcacgctgaatgcaacgctatttggtcattgaacaactctggaaaattgacagtgctgccatgtctcttgtcgtttaatatgggctgatttaaaatttgagagacgtgatttcgaatctgatgtttttttcctgtaaccaattgtaaaacaatacaattttcgtcaacttctttgaacttagtaatctccctaccaccatgtgaaatcaagaaattatatttaggaccatatttaatttcatagttatttggtttgttgaaacgaccggacgactcgacaatagctacatactttctttgcaacttataaccgttgttgccgcccttttgtaaaaatctagagaattttacacttccgtctttagtctttgcaatcagcatcccccccgtaacacaatggtctaacctatgtacagtacgacataattctacttctctatgtgaataataaatagccttgaatctttctagtagtggagtagggtcaagattaggatgtgtcctgccccatgttctgcagtctggtggttgagaaggtatgccaggtggtttattaactatgaagtaatgcgtgttttcaaagattattggtatctgctttttcagagacattaaaatatatcctaactgatcctgatcttatagccattcatacattgttccttttttttttcctcttaagtaacttcgtgggcctaagaaaaaggtaatatgcaaatgataaaaatgcaacagttctcaaaaaaggcattctgccaaaaaacgtgaatactctatgtacgctatctaaaattcaatttaacgctattaatgaaattgtcatgattgaagtcctctctgttggaaatgtagctttgaataatatcccttccaatgtctgctaaatgaccctccttagttagtgattctaataattcaggttgaacagtaaatagatttgcaagttctctcaaagtagcaaatttgtcaatcaaggacgctactccccaatcttctattgcagtttggtagcctatgatatccttcgtaactacaacaccgccaatggaattgacttgaaagtgtgaataatgtgacagtagtaaaccgtataactcttccccaatcaacgttaaaaatgtctgtaagttttttcctttaagaaacttggaagactgttcaaagattaagtttaaaatattgacaatctcaatagccggtaaggtgtcttgatccaatagctcttgagattttggcacaaaatccttcttcttttgcttgcacaaaattgcggaaaatttagtcgaaattaccgtaatggtctcttgcaaaattatattaataagtatttccatcttttgaatttgtgaatttgtcatctcaataatctgagctttaatttctggcgaattatttaataatggtaagaaaatggatttgattgaaattgacaataaatctaatatctccgtgctcattgaaataaatttcaagaaatttaagtttaccactcctgctgttttattaatatcaactttacaaattttccagtaagcgacttctaacgcaatttccatgtacgaatcaacaattcccaaaaacattatttttaatatttctaggatgtatagatgtgctttgtttggaattagttccattactcttgcagtagactccaccacacattttaacatagaatcaacatcgttcaaagaatagttcgccggactgtttggactgttatcaatatcgcttgctgtaaaactagaatttaccaaacttgaagagttgtttgctacatcatactgcgtagaagaagagctgttgttaaacgaatcgctcaaagtatttgtacggtttagactcaaatgatctttatctaaatgagttttcaaaaaggaattaaattgtgacaatttactccttgatgttgaatcttgacgagagtgtgtattccctctaggagaatgcatgaatgcatccacattagttgatagtttctccttatacttatctaataaaaccctcttgttgatttctttatcatagtttacagtaaacttggatgtcatatccactagaatcgcttccaaggatcttttctcaataccgaaatatttggacctatcatatagataatgcgaaaacaaatcagcaaaacattgttctagggttgttgataagatttggttactgtcgtcaatttctaatagttgaaagtaatcaattaaacttttagtgaacttaccaaataaagtgaacagtccgtgtaatattctcacataagccaaatttgagattgacagggaattcctcaataaaacctcaaatcttggttcaattttttgagcaaaaactctttgaataaacaattgtatcacatgagttgccttttcttcaaatacccttttaacaatcttggattcattttttattacagtttccacatcatttatcaaattttgcatggatgtctcgatgataacactgtggttctcaaaatcaatcagctgttccttaaacttcacgttttttatgaaaacattctcaaattcattttccaagtcaatctgcttggtgtcaatgaaataatcgtgctgattgatgaagctttgaatgacattaacaccgccattaaaattgttgagaatgatggcaatttcatttaatttagtaaaattattctctctatatgcagaattaaaattctctaacagctcattttccatcatttcagagtacttttcaataaccagctttgtgtttattgtttttggtattgaacttgtctctagtttggatgataatatcaatagattcttcattaatttcacggactttaagtttaatttccagtttttagacagccttaattgttcaacaatatctgattttcccatggaataaaagtcattgtacctgcgaatcaattccacactttgaatatagttttgctttttcttgattgcggtttctaatttatctcccaatggcgaaacaacttgagtaacatttgtcaagcgatcatctagcttgtcgaatgtaagtaaagtagtatgcaaatccttggataattttatcacattctccgaatgaataacttcctgagtagccacttgctcggaaaaatactgtcttttatttagtgtttcctcatttaagttttttagttcctttaaggtagattcaaaagttctaatgtaaggttttggatctaattgtttccaaatagcctctctgattgcatcctgatccttttcattggttggaagatttttcgtgtttgcatcaatcaacacgtcattacgatggtctttgctcaattcctgaacgaattcattgactgttaatccgcccaggaaattgtccgttttcaatagtttcttccatttcggatcgagttcatataatgagttcatgttgtaacaccacttgatgacaaagcaaatttgctcaattttctatatccctttaatgcatgaacggttctttattttgttttctgtcgacattctagtttttcggaatctcaaaataattaattacatatacgtacataagtagcccagataaacaaaaataccttaaaaaagagttactagccgtatatggatgtttgaagatacatggaaaccgtctctggtgtcgtgtatataagaaacttctagttttattcagacgcactcattatctttgctacataacatttctctctgatttgactgcgcatcttacccctcccccatgcatgtggagtcataggagtaattttaaaggtagaatttcatattaaatatcgctgcttgattattttgtagcaaatcaaaagagtgtttcaagtaagtaaaaacatttgagcctccccatttgttgaaaggagagaaattaaacttggttggggttaattatttgatgggtatattaatttgcaaccgcaaggtatcgataataaatattctacaaaacctttatcaatagtggtgaagtctttagtgcgatctacctggggttaatgaacgagaagttcttgagatatctttcctgtttacctccgtgcatcctgtaaggaattgggtttatcatttatcatttattttagtacaaacttttttttttggcccgggcgcactttttcaagcggtgggaactcatcaaaatgaaaaactagatacttttagacttattaaatggtttaaatattttgagatgttcgttatatcagaaacttccttacttctatcttttattccaatacaaagaagtcacaagattacttggtaagaaagaagcagttaatttttaattttgccgacaagccaagatgcaaattttcgtcaagactttaaccggtaagactattaccctggaagttgaatcttctgacactattgacaatgtcaagtccaagatccaagacaaggaaggtattccacctgaccaacaaagattgatctttgctggtaagcaattggaagatggtagaactttgtccgactacaacatccaaaaggaatctactctacacttggtcttgagattgagaggtggtggtaagaagagaaagaagaaggtctacaccaccccaaagaagatcaagcacaagcacaagaaggtcaagttggctgtcttgtcctactacaaggtcgatgctgaaggtaaggttaccaaattgagaagagaatgtagcaacccaacttgtggtgctggtgttttcttggctaaccacaaggacagattgtactgtggtaagtgtcattccgtctacaaggttaacgcttaagtaaagtatttttaaaacttatatattttaattgatcgttaaattttgaaaaaggcttttaatattgtcattatttacttttctatttacaacaaaagaacaaatgaatagatagacagtagaggaatataagtagtatgcagtgccatgcgggatcaaggaatttgtatctctaattttcgtggttgtatgcgtctctaaacaagtcaatattttgctgtaagatggttctgccgctcctttcagttcctttaagaagcgtacctgcagatattttaacatcctccatggtttcattgactttactgacaagttgattgctcaagtcatcaacatgtttttcccaattttcactaaatacttgcaaaacagcatcgaatcccattttaccctttttagcgttctcgcaaaacctttgaactgaccaatcttccatcttattacacagctttctaatggatccatatgctgtaatttgggcttcctgctggaaaagtgttttattagccgagtcatcgggatgcgggctatatgttacagtttcgtagacttttaatagattgcacatcgttaaattacagcttctcatggtcaagctctttttatttaagtctaccacagaaacttctctgacatgactcatattggtccctcctagcatcatcatgatccatttgggaacaccttgttttacagtaatcaaccgttcagtaactaagaccttaccttgatccttcaattctcttcttaaaacgtccactgcgatgacatgtgtagatatttcatttgggtattttttccagttagcggcggttacctggtcccatggatagttgaaatcgtaactgttttgaaacaatttcattatcgtcttttaattattctcgattattttatcttagtctgaaatctattctttcgtcctattgatgcttaaattcaaaaatatgtacatcacttcgcatgataattttatcgcctatatattctttacatttttcacattcattcctttttaccgctctgaccaatcaacgttgtgccgatgctcgcaaaagatatttttgtccgggcaacggcttttgcgacagacggtaataatagtagggccccttgcccccttctcatcttattcttctcctttcttcttcattccattgttttttagtggtcctaactcaataccctttcaagattatcgttgctctccatggtgtccatcacggtcacatggtgcagtacttccttcctactgctctctgcgatggagccatcgcacataatcatctcattcaagatatcgtagaccttactgaagttaaatataatgtctagctcacaaacattgccgaaatatgtgtccattgtttcgacaaaccgatggataatttccaaggtcagcagttcattgtcaacatcgggcgtcatcccaacaataaaatatagactagcatatcgcttgtatactactttgtggtcattatactcgatgatgttacacattttgggttttcttgctaatatcgtaggtgtcaagtctttcacaatttttgccttttcaccagcggacattgccgtgtaccatttctttaatctgatttttccttgcctagaaaccagcaacaaatattttaattgcgtcatcttgtgtacctgtgtatccgtatataatctcctccaggatcgctcttgttcttggctgaaattgttgttataacttcttgttcattcattgccatttttacacatatcgttagggcccgattcgtttgggatcgaattgttacccgactgaaaggatctattcaatatacattataaaaaagaaactacacatgagcgtgtgcattacctttactcgtcgctgtcgtcttctgtgggtgggacccatgccgcaggtttgaagtactcttggtcatttgccacatctttcccaaacttttctttgtcgtcggcaaactctagcaggtattccagctccaattcatgacattgtctgccgaggatgacaagcgaatgaagtggctctcctgaatcgtaattggctaactcacttatggtaccagacttaaagctttgggagctcgagcctaatctactaattgcgactgctggagtatcaggagtgtatgcctttgtacctcttttctcttcaatttctaataattgttcacaacattgagcgatagacatgtatcttggtggttcgtagattagtctgccacgggccatattttcaatgctttgttccttaactttgatgtccaataacactaaagtatgaaggccaatttttctattttcccagatcttgtcgtaccatgagtctggtctccaattatcggtaaagaaaaccatggaaacggtttgaccgaaattgtatagttgtaggccacatgccccaactgcattcataacggacgcattatgaataatttcgacgggaattgcctcacgtttagctctgagaactaaatctgtgtgtgtggtggcaccaaatggatcgcccacgaccaagaaagcaacgtcttccttatcggcgttatttaggatctgcttagaaccagtctcaactaattccctatcagccaagatgatctctttaccatagtaagattctaactcttcttggcttgcagccattaggatactggtatagtgttctagataaactctagaacatttcttaatagcttccaaaccacgaacggtaatgtctgatttgtacgagagaccaagtccgatcaaataaagcatttttctcactgtcctttattcactctatatcctgttcgtttttactttgctaacaaccaccagaaaaaaatttcatcccatcgcttagttaacttttttttagaatcgcatgcatggggttatttaattttctctaaaggtaaatgcgaagcccagaatcaaaaagatgaactgtctaggggaagaagacacaagatcctcctgtttttgggattttttattgcttagtgtagtgcattactccttgaaccttttaagatgcacactaactcacccttacgagcggataaccaagatctagaaactcaaccactgttgagaccaaacactgaagaaagccaactcctcaatgatgaagtgagaatcaacgttgcaaatgagacccttattaaatctcgttggcggagtataaagtgcttaattatatatctgctaggtattgttttattaagtttctttggcgtcagcatagtgcagtatattaggggacatgtgccgcccacagatgtgatagaaaagaatctagttcaagtaacaaatttcaaactggtggagtttcagcttgatggttggaaagataatatgggctctgacctgaacaatgatacaggtaagtatttgcaggtgtctatacactctcaaatttggttcgattatgacaaatggccaggaacggaaaatgactcggacgccagaagccaacgtgactggatacggtacatcaatgaaaaagttcttaaaaccatttgtatagatctgaataacgtgaccacattcgatggagatctagtgttcaagaataaactgggagatgttgttggcatggaacccatttgttttaatttggctcaccgacagattaataacctacagttcaaaattttagttaaaccgtctatttggaaaatcgtaaaagttttgaaaaaattttggaatagggattttgaatccttaaatataaaatcgaatttagatatgactatcttcaagagaaaatttggcacgaggtttaatttattgaaacttaatgacgaaatcttagattggaaagatattattgattgggaaaaaatatcggcaacgccccttcggatgattcaaaatatgatcgatggaatatctcttcaaggatttacattgcgggactccagttctgatggatttcatgccgatatgagactgaatccgatcacgattcttggaggggtggactggcttcaccttccgccaggcacgtcaatccctttcatcaattgggaaatcaagctaccggactgtaacggtgagcctgctatcgcaattccaaccttgtcttgctttaacgaaccgattaatctgcaccacgacaaggataatatcgtcgtctgtttacaaaatgaaattgaaggtcctctgcccgatgaactactataccaagaatgtcctcaaaatagtcttacaccaatgagccaaatagtgaatgcggtcctgaaccagaacgagactgttacgttcgcagcaagaggccatgtccttgaagatggtatagataataactcattgattccagcagacatgctggaggatattttccaagaagcatcgtttattcccattactaccaatgctacgtttaactccagtgaattgattcaagagtttcagatcaacgatcttcagctacggtgggcagcgcgcaaaaagctcagtcttgtggggacatttttaggattctttgatctatccttctacgagacgcaccagcaagaccgagttcgcatcgataccattcggggacagatcgatctgtaccataacgacatcaatttcttaaacttacccatgaagcaatggatcaactcttcatcgcacattctgcacgatgaggacacaggaaatacgcagatgaagcttcaatttgatctagaaaatgacgacatggaagtcgtcaatagcttggaactaacacgaaccctgaacgaaatactattccagggttttacagttattcactttaatgcgacgatagatgcgtcacttacgacggcattgggcccgtgggttctcaccgggttagccggagagggtgacactttggtcacgtgaacgtctatctatttatttttataactccgggatgtcattgccggtggtccgaaaatcggcaaataaggaaataagggaagaatatgcagtagtcaaatcatcagtgttctctttgatacctttcagggctaggaatagtgggggtggagtataatatcaaaaaccggacttaacattattggttcggttggaattggctataggcaaactagtctccggcatgatatataaatgacagcctgcaattgtatgttactacactcttgacttgtcgactacagtcgctgctcaggcacgagaataggaggtaagaaggtaacgtacgtatatatataaaatcgtaatgacaaagattaaggtagctaaccccattgtggaaatggacggcgatgagcaaacaagaataatctggcatttaatcagggacaagttagtcttgccctatcttgacgttgatttgaagtactacgatctttccgtggagtatcgtgaccagactaatgatcaagtaactgtggattctgccaccgcgactttaaagtatggagtagctgtcaaatgcgcgactattacacccgatgaggcaagggtcgaggaatttcatttgaaaaagatgtggaaatctccaaatggtactattagaaacattttgggtggtacagtgttcagagaacctattattatccctagaattccaaggctagttcctcaatgggagaagcccatcatcattgggagacacgcattcggcgatcagtacaaagctaccgatgtaatagtccctgaagaaggcgagttgaggcttgtttataaatccaagagcggaactcatgatgtagatctgaaggtatttgactacccagaacatggtggggttgccatgatgatgtacaacactacagattcgatcgaagggtttgcgaaggcctcctttgaattggccattgaaaggaagttaccattatattccactactaagaatactattttgaagaagtatgatggtaaattcaaagatgttttcgaagccatgtatgctagaagttataaagagaagtttgaatcccttggcatctggtacgagcaccgtttaattgatgatatggtggcccaaatgttgaaatctaaaggtggatacataattgccatgaaaaattacgacggtgacgtagaatcagatattgttgcacaaggatttggctccttggggttaatgacatctgtgttgattaccccggacggtaaaacctttgaaagcgaagccgcccacggtacagtaacaagacattttagacagcatcagcaaggaaaggagacgtcaacaaattccattgcatcaattttcgcgtggactagaggtattattcaaaggggtaaacttgataatactccagatgtagttaagttcggccaaatattggaaagcgctacggtaaatacagtgcaagaagatggaatcatgactaaagatttggcgctcattctcggtaagtctgaaagatccgcttatgtcactaccgaggagttcattgacgcggtggaatctagattgaaaaaagagttcgaggcagctgcattgtaaacttactcaatgacagattgatttatttatattatatattccctttttatcgaaaaacttttagtattttctactcgtaacatatgatcttctgttctcactgaaaatttttctttcttcttttccctcttcgcaaaaagaaaatgctgaaaaaatttgaaaaattttcaaatgatgagatgtttagcttaggaaaaatataatgtaaagatagttttcagaacattttttattggtttttttttttaaagattcattatcatctggagttcgttacaacctacacagaggaccgatatacacaatgtcaaaggaggatttcgttattaagcctgaagctgcaggtgcttccactgacactagtgaatggccattacttttgaagaattttgataagttattagtcagaagtggtcattatacccctatcccagctggtagttcaccactaaagagagacctgaaatcatatatcagctctggtgtcattaatctagataaaccttccaacccatcatcgcacgaagttgtagcttggatcaaaagaatcttacgttgtgagaagactggtcactctggtacattggatccaaaagttacaggttgtttgattgtttgtattgacagagctaccaggttggttaagtctcaacaaggtgctggtaaggagtatgtgtgtattgtcagattgcatgatgctttgaaggatgaaaaggatttgggccgctcactagaaaacttgaccggtgcgcttttccaaagacctcctttaatctctgctgttaagagacaattacgtgttcgtactatctatgagtcaaacttgattgagttcgataacaagagaaacttaggtgttttctgggcttcctgtgaagctggtacttatatgcgtactttgtgtgttcatttaggtatgctattaggtgttggtggtcacatgcaagaattgcgtcgtgttagatccggtgctctgtctgaaaatgacaacatggtcactttacatgatgttatggatgcccaatgggtttacgacaatacaagagatgaatcttacttgagatccattattcaacctttagaaactctattggttggttacaagagaattgtagtgaaggattctgctgtcaatgcagtatgttatggtgcaaagttgatgatccctggtttattgcgttacgaagaaggtattgagttatatgacgaaattgtcttgataactaccaagggtgaagccattgccgttgccatcgcacaaatgtcaaccgttgacttagcttcctgtgatcatggtgttgttgctagtgtgaagagatgtatcatggaaagagatttatacccaagaagatggggtttgggtccagtcgcacaaaagaagaagcaaatgaaggcagacggcaaattggataaatacggccgtgttaacgaaaacaccccagaacaatggaaaaaagaatatgttccattagacaatgctgaacagtcaacttctagctctcaggaaactaaggaaactgaagaagagcctaagaaagctaaagaagattctttaatcaaagaagtcgaaactgagaaggaagaagtgaaagaggatgacagcaaaaaggaaaagaaagagaagaaggacaagaaggaaaagaaggaaaagaaagaaaagaaggacaagaaggaaaagaaagagaaaaaggagaagaaaagaaagtctgaagacggtgattctgaggaaaagaaatctaagaaatctaagaaatgattctcatcactccatctcatcctatatatttaacagctttctttttttcaaaaaactttttctattattagattagattttttttagtgtgtatattaataacgtaaaatttctttatcaacgacttgtagtattcttttacttttattttttttacatatgcaacgttatattcttttttaaatatccccatatactaatgatagaacttttaaacttttaggccattgacgaatttcatgacttcaaaacagtagttcagcaattggcccatgacattatttagaaacaaccatgatagcaaattctcatttgattttaagctaatatcgccgattattgcattcctgaatcttgtgctgcaatcaattaatttcaagcacgaaaatttgctttgtagggaaataaaggaacaaaaatctttaatcatttcatttaaggacttgcattcgatagacacagagggatcattgctaacgctcatagaggaatttaagaactttgttacgaaaacttgacagaacccttgtaaatgttgcattattgtgtttgtctctgaatttgtatcgtcttcattaatcatcatttccaaaatatcgtctaaatttacaatattcttccagtcattattcatgccacttttaaatataggaaaacttttcaagaagtttagaatgaattttaataactttattagttttttcactagtttggtaaaattattaataattgataacttcctttgcactagcgcttttggtaattctaaaacagccttattaatttgttcgggcaatagcttgatcatactttccagtttttgaatgattgagtcactgatctcattagaatgaattataaattgtgaaaaaaatttgattaaccctgtataggtgattaagtcacatttagttacccaatcaatcaatggctcagaaatgaatagattaaacatcgtgggcgatatagagttagagttagagaagaataatgcatttgatatattatcactcttcagaaacttgatgcattcataaacggagttgcaatggatatgatataatgactccaaggatgatataacatccgaatcagtgtctgtggggagtacacctgcgggaatttttgggaagtctaacttatatgatgtcaaaagcggatgttctgtgttcgataatatttgggtattatagttatctgatagcttgtcattacaattgaaaactttttcaattaaatcatgagtgaaagttaattcatctgaagacagtgttccggtagggttatttgccgctggtggcagcgaatctagtttatttgcttctgtttcgtttggatgctgtgattcgagttctggttcgttagggttgtcattactactctgtttaacgggcgacccagttcgagaaagactttttctatttaatgagaacggcgatgaaacgttaggtacctgcggcgaaggtgaagagggcgatggagacgataggggcgatatgggatcgttattgtgtactaaggataacgaagcattgttgttattaagggacacggagccgctttcgttgacagttagtttcaatccgcagtagtggtatttggattgacctctcatacccagccttctagtcgttaaatcaggaaaaactgttcttatcaacttccctaatgacgcctgtgataagggcttcaggttgttttgggaacaagatgaagcgtattgagcaaatattttgcctcttggtacgtaactatcgtgctgagatttacaatttttcattaaccaaagtaacgcaaacacttgtctttctctttctctgttttgttccgccagctgcaaagctgcctttgaagtgttctgtgagtccatgctcaggactttgatttctgcatgcttcacgatctgcgcatactcctcgatggttttagatttgttattttctgcaatttgcttagcaattatttcttgcgtgtttctccttgaaatggaagagattcgtttctcttggcttgttttctgttttttcgtactgcttggaattgaggggaaggtattggtacgtttggcagcagtaggaggattattgtttaaggtttcctctgacttgaaagaaagtgggtaagcagatgaattcgatctattcaggctgatagacgctggatacactgagtatgtggcaggttgccgttgtgttgcgggttgtgcaggaggctgtgtaggggtaggagatggtttatgggagccgggaccactaccgataagtggcggtaatattggatttggcgtctccgggcggggggaactttggtgtagcaggctgtatattgacgatgatttgctcgctatgggcgggatattcactgacatggggggcaaataagtgtgtgatgctggcggtggttggctgctgtacttgggtgcgtttaaactgtaccgattactgtttaccgaagatccgttacttggaccgttgctattgtcgttcgagccccgactagtaggttcaatgttattatcaccggacatgggcaaataaaattcaaaataatgaacagacaaaaaactaggcgagaagatgaagtacttggcaggtatttttctagtgaaaaggttttctgttggtttgcgttctttgaagattaccatttactgctattttttttttcaactttttcccaaatcgccatgacaacacgaaacgacaggagaaaaattacgaaatcaaaaacaggttcaactgttgcagcaatagacaccacaaacgtgcgcaagaaaccgcaacgaaggggaggtgaccgtgcttgaaataaaatccgaagatccataggtgagccacgagtttgattccaaactcgtggttttaccaacgaagctgtatatcgtggagtggcgctaccattggaccttcgtttcttctttccctcttccgcaccgtaccagataggaaaaaccgcaccttcgtttttgcatacctagatggtcctgtaacaagaatagagctaaagaaacaagtatgcgtcgactgctgccacgcccggctgatttaggtgcacatcagctacccagcatacaaaggggcttccgtacggttgatggttatttttcttggtgtgttggtgctgctgtatcgctggtgctgtctgcgttattacgactatcgtaggacaaggcctcgagaggtgtagggtaaatcccacttgcacaaagtatgtacacacttgattatccaaataccaagagagtgtggttcaatttacgggcagctcgagctgcccgtaaattgaaccttccccttccccacgctcaaggggttcctgcgccggtgtttcaggggcaggacacgcggggatcgctggcacagtatataaacaataaaagaacaatggagagaggaggcgccattcaatatcagctcactagagtgcatagacgtatagacacaggaataaagatagaaatagggtaccatggagctgccttcaataaatagcaccacaagtatatccgacaaccaggagttaaggaattactatgacaagttgctgttcaagaacaatagtggcaagtcgctagcggatttgccaggaaaaatggcagattttaacgacaacagcgctgctgcgcatccccgctccagagttgactttatcaacggttacatcggtttcagagaggataagcagtctcttctggggcagaagaacactaaaagggcctcgttcagcgcatttgcggacgaaggaaggaaacagagcgagatgagcattaacgggaagagccctaatttgtctcttttctcatttgagtttaacggcaccccgactcaggacagaaagccatacaaacaggattacttgaatgtgatgaacacttcgcctaacaatattctttctcccttaaacaacagctcccaaaaatactatccacagaaacagcagcagcagcagcagcagcagcagcagcaacagcaacaaagcatctttgacccgggaagaagatcttcctatatttctgatgcgctgattcatggcaatgcggctacccagcaaccacaatactcgcaacctgtatatattaacaacaacccatctttgcaagtaccatacactgctccttccgagtatactcagcagcaacagtactcgtcacccttcaatgctaggcgcaacacccagccagtgctgaacttgcatccggcagccgctcccacaaacgatgccggattggcggttgtcgacggcaagaatttgacgtcatccaaggagctgcatgacttatatcttgactgcgggtcaaactattttgctagtgataaagtttataaatttattgacagcataaagggaactttacgcggggataatgtctccgcctccagttccaggattatagagtttttggattttttgaaaaattgtaatctgaattacaacccacagtctgacgcattcatctccactgctgtttcaaacgcttcgtcgaccggggcggccaaatccaagaacagcacttcaatgcatttgcactataagccattagtgttagtatcgttgaaaaatggtaagctcgaactgttgtctaaaccacaaacggccacacttatactgaaaaggggcgatttggtcattattgatggtgatcgtggtaaagatttagttttggtggtggaaccggttgtagatataaatttggcactatttataaattttttgaagaaaaaaattcactttgattctctaatcaccaatagtcaacagcatttccccaatgaccagtttatcaagactctggttgatacaaccaatggtaagccggtcgctcatgagttgaatccgaagttatatgatatcattgaactaacgcaattgatcatcccatcaaagcaggttctgagatttgccaccccgtgggaatcctccacgaatttacacaacaaattccaggatgagctaaaggctcttcacattgcacagctaaaactgaggtcgctaaataacaataactccggtggcgggttgaacatcaaaatattgaatgcagagttccaattcgacagaaagaaattgactttctactacatttgccaggagcgtaatgatttcagagacctgatcaaagaactctttaagttttacaaaacaagaatttggctttgtgctataccgaacaatttatcgatagattccaaattttatgattcaaacaagtttgagtgggagatgtatcaggatatgatgtcccactattccatggacaacactggaattgtcgtggcccctgaactgaatcgcttgaaactggacgacttccagatcggtgtttatatggaattggtgaaggttttgttcggctaacccaaacttatataatcattataaacattttataaacttatacacttttttaataatctcaccatgtttttcttatgtgttttgtttgacaatgacattactccctacaaacatgtgcgcgtttgtgacaaaaacataaataaaacaaaaataataaaaagtcaagtgaaaagcactgaaatctaaaaaataaatacatatacatatatatatatatatacctatttcgtttccgcatagaagaaattggaggcaactagttgcaggttgttttccttagcccatttgccaacaccggtggcaggggtgccgtaaccccagttcggtctatccttaattttcgagaacttagatgagtccacgcccttaggctgcttatataacaagaaaacatatctgtggggaccggatcccttgggtggagctggtcccatatattctattagtgtgttcgagcccttcgtattgaactctgatgcaaaaaattcggttgctccggaggtctcgtgagtagcctcattcaacagctttaagtcgcattctaccaagtggcagaattcagaccacttgtgatctgtcttagagggagcatccggatcggtcattaccagtgtgaacaaatcgtcgtcttggggaacgtacgcattcgcctgtggtacgcttttttgcatttgcttattgaacgtgaactggaattggggcttggaacgtgccttctcagtgggcagcgtgttacccatggcaacaggtgcacttgatgagtactctacggcaagtatcccggagggttgaaagcttgtgtcatgaattacatcctccagaatgccgtgcttcttgtaggagtcaatgcttgcttgtgcgaagtctattgcttggttcatgttttttgcttgttctcttgttcttgtattgatgcactggtagggaaaaggagcactgcaattcgtttcttgctgccccctttttatataccaattgagatctttccttccctgaacagcccctctatcccttaaaagatagaaaagttcaaagggataggaaaaatcaacgagccaaaaaaaaaaaaaacggaaccgttcggcatgtatatattcactatttcatatacgcgtttgcacaatatactctatcttatccgtatctatacgagccggttgctgcaccttacatgtcatagttgaaatcaacggtcgtgttttcgaccatgtaataattggcaccgaccagttgcagattgttctccttgatatagtcataggcacccgcaccaggagtaccgtacccccaggagataatgttctcaaccttggtaaaagtggacgaatccgctcccttgggttgcttgcacaggaagaacacgtatctgtgataaccggagttctttggtggaccaggcccaatatagttatttctcacgacacccttccccgaaatggcaatatctcccccaggtccgtactcgacaggaatatcagtgatgatgtagtgacaaacctccgaccacttatgttctgttctagagggcgcgtccgggtcagtcatcaacaaagcgagtttatcctcggctgacaattggcttttatcgaagggcgtgaacttgatggtaggagcggcttgcgtagcttccattggcatgggattgcccaatttgatgtcgtcagaatcaacgtacgaaaccgacaactcaccaagaatctcgaacgccaagtccttgacggtgtccttaatgatgtcctctttgttcagtttagcaacgatggcactagacataatatatatttctattactaagtactcggatgggtaccgaaagtggcagatgggcagtgtttactcaaacaattgatggcaacattcaattcctcacctggtgcgcacttccaataatgagcacgcttggcacttttatattgttcaaaaaaatgtcaggcaagatcttttgaaaaaaaggtaccgaaacggacgtaagacggaaatagaatttgaagataaagttatatatcactacacacgaatactttcttttttttttttcacaggaaaactgtggtggcgcccttgcctactagtgcatttcttttttcgggttcttgtctcgaggaaattttagcctcatcgtagtttttcactctggtatcgatgaaaaagggaagagtaaaaagttttccgtttagtacttaatgggattggtttgggacgtatatatcgactggtgttgtctgttattcatcgttgtttttcggttagcttcgaaaaaaaaatagagtaaaaaccaggaatttaccctaaaaacaagaaaaaataagataaacgaaaatatggccggtacatttttattcacttctgaatccgttggtgaaggtcacccagataagatctgtgaccaagtttccgacgccatcttggacgcttgtttagccgaggaccctcactccaaagttgcgtgtgaaaccgcggcaaagactggtatgattatggtctttggtgaaattactaccaaggcacagttggattaccaaaaaatcgtcagagacaccatcaagaagattggttacgatgattccgccaagggtttcgactataagacctgtaacgtccttgtcgccattgagcaacaatctccagatatcgcccaaggtgtccacgaggagaaggatttggaagacatcggtgccggtgaccaaggtatcatgtttggttacgccacagatgaaactccagagggtttgcctttgactattcttttggctcataaactaaacatggccatggctgacgcgagaagagatggctctttagcgtggttgagaccagacaccaagactcaagtcaccgtcgaatacaaggatgaccacggtagatgggttccacaaagaatcgacaccgtcgtcgtctccgctcaacatgctgacgaaatcacgaccgaggacttaagagcgcaactaaagtccgagatcattgaaaaagtcatcccaagagacatgttggacgaaaacaccaaatactttatccaaccttccggtagattcgtcatcggtggtcctcaaggtgacgctggtttgaccggtagaaagatcatcgtcgacgcttacggtggtgcctcatccgtcggtggtggtgccttctccggtaaggactactctaaggttgatcgttctgccgcttatgccgctagatgggttgccaagtccctagttgccgctggtttatgtaagagagttcaagttcaattttcttatgccatcggtattgcggaaccattgtccttgcacgttgacacctatggtactgcgaccaagtctgacgaagaaattatcgacattatcagcaagaactttgacttgagacctggtgtattggtcaaggagttggacttagctagaccaatctacttgccaaccgcttcttatggccatttcacaaaccaagaatacccatgggaaaagcctaagactttgaagttctaagcttttttccttttggacttttttctgccttcaacctcccatgttttcatttgctcaacacaagtcaacatgtacattataccgtatttgatgcagggacgcaataccatcatattcttgatatagactcatttttctcaaatcaaatttgtatcgatttcattttgcattatacaggattccttttcctttctaacatttaatacgtaactactaatattaatatatacctccttcaacggatcaacaaaccaaactttatcttattcaaatagaatttaacagatccaacgccttagttaactcatctttggcggtgggcaggtcttcataattcaatgcgcttatggcgtatttggcaagtttttgaatttgctctattttactggccctgtccataatttttgtcaactcatcctttgtatacgatttatgctctgctgcagcaggttctgatggtgcagaagggcgcgtaagatccacttctttcttcacaacttgttgttcgtcttttgttattgcatcttcgttcttgtcgacggtctgttcttcttcgtttacgctatcggcatcatcaataaattcaggtacctcatccacaggctcgtatgatgttgtttggtcttttggggctaggccttcgactttatcattattattgttttccaaatcgcttgtctggtgatcaacatcttcatccttaatctcctcgctatcatccgcaaaatctgcataatctaacgttttctcgtcgctggaaccaatttcaccctttgccaatttactcaaataaattttgcaatacttaattcgtttttgtaatgaatttgtactcgtttcacttatattttccttccacaggtgtaaaatgcatgaaaataaatcaatacaacaccaaagtgatctttttaacataacatcccagggaccatcttttagctgtttcagtttctcgttatacaacgacattgtaaaatttagcatataaattttggctttttcttgatcatgtattagcgtgttcataacgtgtaagcttttgtcactgtcttctgcttcactctcgccgccaatctccttcttaaacgcttcaatagtatcaagaagttctgtcgctagtgcggtcatctcttgcgaccgatcttcttcactcagtatcaattccaccgcatataactgaagatagtatccgatgatccctaacccaactttgtcaaaatccttcgctgtagcgacaacccttgcagcgttactagccatagaatttatttaaaatgtggacaattagtttctaaaaattgaatcaaataaaataagaaagcttattgttcctttttttgtcttcatctggaccgtttggataagatcattcaccaaatcttagtttttttttttagtttccttctccaacgatttcataataataaaaaaaaacaacaaaaaacacgattgagaaacatcaatatgaactaagcaatagctaaaaaaaaaagaataataaaggggaacacagtataattctcgagaggatggcgttggaagaagtggtacgatacttaggacctcacaatgagatccctttgacactcactagagactcggagactggccatttcctcctgaaacattttctgcccattttgcagcaatatcatgacacggggaatattaacgagaccaaccccgatagtttccccactgatgaggaaagaaataaattactggcacattatggaattgctgtaaatacagacgaccgaggtgagttatggatagagctggaaaaatgtttacaattattaaacatgctaaatttattcggtttgttccaggatgcattcgaatttgaggagcctgaaacagatcaggatgaagaagatcccagccattcgaaactaccagaaaacaagaccaaaagtgaaaattctaaggataatatcagctcaaagaggattaataatttacaagatatgagcctggattctgatgcacacagagaattaggctctcctttaaaaaaactaaaaatagatacctctgtaatagatgctgagagtgactccactccgaatactgccagaggcaagcctaacgatgatattaataagggccctagcggcgacaatgaaaataatggcactgatgacaatgacagaaccgctggacctatcataacattcactcatgacctaacttctgactttttaagcagtccactgaaaatcatgaaagcactaccttctccagttgtaaatgataatgaacagaagatgaaactagaggcattcttacaacggttgttatttccagaaattcaagaaatgcctacatcccttaataatgacagcagtaatagaaattcagaaggggggagctcaaaccaacaacaacagcacgtatcatttgatagccttttgcaagaggtaaacgacgcttttcctaatactcaattaaatcttaatattcctgtagatgagcatggaaacacaccattacattggctgacttcaatagcaaacctggaattagtgaaacacctggttaagcatggttcaaacagattatatggtgataatatgggggagtcatgcctagtgaaagctgtcaaatcagtaaataattacgactctggtacttttgaggcacttctagattatttatatccatgtttaattttggaagactcaatgaatagaacaattttgcaccatatcattattacgtctggtatgactggctgttcagcagctgcgaaatattatttagatattttaatgggatggattgtcaagaaacaaaatagacccattcaaagtggtactaacgaaaaagaaagcaaaccgaatgacaaaaatggggaaagaaaggactctatactagaaaatttggacctgaaatggataatagcaaacatgctcaatgcgcaggactctaatggcgatacttgcttgaacattgcagcaagattgggaaacatttcaatagtagacgctttattagattacggtgctgacccatttattgcaaacaaatcagggttgagacccgtggattttggggcaggtacttcaaaattacaaaatacgaacggcggtgacgaaaactcgaagatggtctctaagggtgattacgacggtcaaaaaaatggaaaggccaaaaaaataaggtctcaactgttgaaaaacccacctgaaacaacttcgttaattaatgatgtccaaaatttactgaattcaatctcgaaagattatgagaatgaaacagtgcaatataatgagaaattagaaaaactacacaaggaattgaacgaacagcgagaagaattagctaattctagagaacaactagcaaatgtgaagcaattgaaagatgaatactcactaatgcaagagcaattgaccaatttaaaagcaggaattgaagaagaagaggaaagttttagggaagagagcaaaaagctaggaataattgcagatgaaagttcaggtattgattgggactctagcgaatatgatgcagatgaacccttcaaagtagagttcctttcagatttcttggaggataaattacaaaagaattatgaaggcgatatttccaaactattagaagcggagtcgaaagagcagataatggaacagatacgaaatcaacttcccgcagaaaaaatccaatcgatgcttccaccaacggtcttattgaaggcaagaataaatgcatacaagcggaatgataaacacctaaccaatgtattggatacaatcagcaccaaacaatcagaattagagaataaatttagaagagtgttatctttatgtttgaaaatcgacgaaaataaagttgacaatatgcttgatggtttgttacaggccatatcttctgaagacccacaagacattgacactgacgaaatgcaagattttttaaaaaagcatgcttcatgagggcatgtgatttcattgcattaacttttatgactttatttgaagttatttttttgttttagcgctttatttacttttattttactacataactgtattcttacaaaatttttacgtactcagatgggatatataggcacttgatgttttattttcttgttcttatcatatatccgatggaataaaatgttctattttgctggctttttccaaaaatattgtttatgtgtccttctacaagatcttaagcctgtccttccaccttttaatgaactcaccaagtttcttctctcgtaatcatcatcgttttctaaatcgtagaaatactcttcgtccaatggtttgccggcggcgtccttaccatgacggtaaatgacaccgacacatttcgcgtcgctcaaaatcgaacgtaattcatctcttgaaagctcagaaatttgtgagttcacctgctgtaattggaataatggcgtctgctggacgtttgcaaaagctaggtgattggttaaaatatgctgtagatgcataacatcaatatttcttctagatagctcatccaaattctctttcaccgatttttttggctttgaaggtaagaccctcttgttaagttttggtttcttcatagtcataggatttttatcagatgatagtgaatcttgtctcagggtttgttcctcgtgatcaacagaggagacggatgaaagtggggacgatttagaatttaggaagtggtttagcatcctttctgcaacgccagaatcactaccaattgagattttgttgctatccttaagtatttttttgggtctgtccatcgaagtgtcagtaaaaatcaatggatgcttccttatactacccatatgtttcgtttcactttcactttcaaattcagctttcttctcgaatcttaacggctctgaagaagagtttttttcttttaacgaaatgcgaagtaaaacctgcctaaaatccaacatgatacccttgtaatatgtcatataaacggtgtctccctcttccagagtgaaattaatgaatcctccctcgtcttgaatttctttaacacatttttcgttagagaatctgggaacaagcctatatgccctattattgttattcatggtatcctttaattgataacaatcaaattgcttacgataggtaacgattaatccgttcatactgaagcagtgaatcttcacttcatttgtttgtggtaaataagttatactagcgtgtactctggatatgaacttattcttacagagcgcaacatcacattgcgaactattgcgccctacagtaatggtgctgatcttgctaggatctagttcagcattgatgactctagtatgccttgaaggagaagaaagtttggaagaaaacttgggtgacgtttctgccaactggccaggaaaagctggagaggaagggatggcgtcaaccttattcgacctaacgggagacgaaacccttcctatactggaagaaggaaatggagttggataatctcctttcccgaaatttccaattgattctgacgcagttttaccagctttctcataattggatgagggacaattaggctgctgtttgtaatttggtggagagtacggatccactgtcctgtagggggacgaaggaaattgcgagctcatgccttcttgtgattattaatctttgatgtgtcgtggcagatgtatatggacttttgtacgtaaagtagattgctataattcaattctaaatgaatgaaagtagagaaagagtttccattgatgaattttagtttacgtcgactgccgctgttcattctcatcaaaacacgaaagcaaaccatagagatgaacttaagaaaaaagggccacgggatttttttttcgcgttttggcgttttcatatcaaaaaaaaaaaaccatattaacatctgtacattattattaactaaacatccgtacacaaaaggttttccaagacaaaacgttgtcgagactattctctttcgaagaaattctaaaacacacttcggcaggccggcaacaagaaggcggccccttggggaaagggaagtcaatccgtctgcccgttctctaggctgatggtaggcagggcgatgccatactggtgaagtgtggtccgtcggtctgtctcctccaaacgttgatgttctcctggtagctttctcatcaccgtcaatattacaagtgtaagaatgagaaatgctctatatgagggtactattaaatttcaaaaatgtttacttttaagaggtatttgctaaagcctcatacaaataatatagacaaaaatgggtagtatgtagtaggacattgagaataaaactgtgaacctgttattgacgaccgtggagaaatgttatgattatctgaagagaaatatcggaacgcatgcacaccaaatttatacttagcaagactggacgatacgagactggtatacttgtatgaagacagaatagtgaacgaaagacatgcgcatgacaacaaatttaccgtatagaagaaatattctgcttgtatgcctgagggaactcgaaaggatcaatttcaatggcgttgtaacagtcacgaaaaaagtgtaactataagataaagcaaattgtactaacaaacttaaccaaattgcacaacaatttgattttctttttaaatagagggtactccttcattcggtaaacgtcacaacaagtcccacactttgtgtaacagatgtggtcgtcgttctttccatgttcaaaagaagacctgttcctcctgtggttatccagctgctaagaccagatcttacaactggggtgccaaggctaagagaagacacactactggtactggtagaatgagatacttgaaacacgtttcaagaagattcaagaacggtttccaaaccggctctgcttctaaggcttctgcttaatttttatactaagatctatttctttaaatgaaaactcaataattagagaccttatataataaccaactgcaaaaaaacttctaaacaattagttaacaaatctccagcctttttttaatatatctttattcatatgtaacgcctttgagtgcttacgggaaaagtagaattgatagtttcgtaattcatgaccggaaaaagtgaaaaattattgttcgatgaatatatacagagatgtcttgaactgtttttgccagcatcattcgttatagggagcaaagttagtgcaacccagttaccagatatctagtcaccaagaagaaaacccgtaaaatcgtaggtcatggtcgaagattccagagttagagacgccctcaaaggtggtgatcagaaggcattaccggcctctttggttcctcaagcacctcctgtcttgacatcaaaggataagattactaagcggatgattgtggtattagcgatggcatccctcgagacacacaagatatcgtccaacgggcctggtggtgacaaatatgtccttttgaactgtgacgaccatcaaggtttattaaaaaaaatgggtagagacattagtgaagcaagacctgatattacccaccaatgtcttttgacgttgctagattctccaatcaacaaagccggaaagctgcaggtctatattcaaacaagtcgaggaattctgatcgaggttaaccccactgttcgtataccaagaactttcaaaagattttcaggtttaatggttcagttactacataagctttctatcagatcggtaaattctgaagaaaagttacttaaagtcattaagaacccaattaccgatcacctacctactaagtgccgtaaggtgacattatcctttgacgcaccagttatccgcgttcaagattacatcgaaaaactagacgatgatgaaagtatatgtgtctttgttggtgccatggcaagaggtaaagataactttgcggatgaatacgtcgacgaaaaagtcggcttgtccaattacccattgtctgcctcagttgcatgttctaaattttgccatggcgctgaagatgcttggaatattttatagtgtttaagtctacttggcatcctctttgtataataaacagtcaatatacgatatagaaacaatcgagttagcgattaattcgactgcacctctatccttcccccacgcgaaataatggttcggaagtcatctgaacgaggctcagtctttgaatatttcacctaattcggaccctgaacggtgaacaaaatttcaatatgatataaacaaaacgtggaagaactcttggcaaagacaaaggataaagagctcgttggaaaagtttttttacaactgcaaacggcacttaatattgctaattaacttgccagtatcatttccctagcgccttgccgatttggtctttttggcactgtttattcttactaaacgatattcgtaaaacggaaatcaaagaaaaccaaaattgaagtcccaaagcgtggcaataaaagaacaagtaactgcaagaacaccaagaagctacagtaagaaatgaaaaggattttctctggtgtgaagtccccaaagttatctgctcccccaaaagttttcaaaaatgatgagagcccatccactccgagctctcccaaattcgaccaagggcttcgaagtttatcagcatcagcttcaagactcttcagtaactcaatatccactcctgggagccctacgttagatcttccgcaagaacactctattaatggtgatatctcaccagaactagtaccaatcgttactttactctctgcacaggctcataggagataccattatggtatattcttgatattacatgatttgaagacagacggaacacctgccgcgcgtcagtgggaagaatgctatggtgtgttgctaggaactcagctggctttatgggatgcaaaagaattatcagattccaagaataataagaacacatcaaccatgaaaaaagccgcatcgagaccttcttttatcaattttacagatgcttctgtgaggagtttggacgctaatgatcaggtaatcattgcatcagagaacgaaaagacaaagaaagatctagacaatgttcttgttgtttcaacaactttaaaaaacaggtatttcttaaaattcaaaaattcaaaatcattcaaaacttggaacgcagcaattaggcttagtttgttcgagtttacggcgttgcaagaggcctacacgggctcatttttgtcaagcagaggtgttaaacttggtgatatcaaagttgttatggcagatacaaaattcacttatgaggactgggttagcgtaagattcgggacaggtatgccatggaaacgttgttatgctgttatttctccacagtctggcaaaaaaaagaaaaattcgaaaggttcaatatgtttctatgaaaataacaaaaaaaccaaaaaatcaaacataatgacaacggtagtagatgcacgggctttatatgccgtttatccttcctcgccgatattaatcgacacatctacaatcataaaattggaaggttttgtctcttttgacaaaagtgaggaacctcaagaaaccaacctatttatcatgcctgaaaagcatcaaggtgttccgggatatgacactattattcgcttcttaatcccagctatgaacgcgttctacttatatggtaggccaaagggtttgattgccaacagaactgacccagactccctgctgtttgccttacccactcttccgcatatatattatttgcaggtggatgacgttttatcattaacaaaagacaaaaattacatacattggagtgctgctgattggaggaataacattgttcaagtattacagaaaaaattaagtaagggctataaaggctgtggtaataaaactgtatcagtttcatctgggatgatgaagtcgccggcaattagttcagctgaattatttgaagggtacgattctctccctgaaagacaaatggaaagtccgcaaaaatctaagatgaagtctcctacattagcatcgaccgatgatattaattccgcttctgcttccgtaaactcacatgctacctcagtaaaacaaactgaattatttgtgactgataattcttcaaaaatcaatgactctgtgtcggcgcagtccagtgtcactactaacttcaaagatacttttaccaccccaatgacatcaggaatgctcaaccatgaaaattcagagagaagctttggttcaggattaaaactcaaaatcactgattcaaatttggaaaatatggaagacgttgaagcgaaatctgctaacgaattctctacgacaccagaagacaaacatattcacctcgccaatgcagccgaattatccgccctttacgacaaatattccacatctccgtttggtaaatcggaggctaattcaagccctaaacctcaaaaattggaagttaaagatcggtcaaaaaatgaaaacagaagcccctatgagagatacgtaggtacatccgctgaaagcaagacatttgaaataggtaacgtcagagagtcgaaaagtacgataaatacttccctttcttcgcctttgagggtagaagatagtagacgttcaaaaaatgaggacctgggatctttgaaagagtttgaagagttatctcaaaagattagcaatatgggaatggcaaatatttcttcagaagctttaagtgacacagcagaaaacagttcttttgttacggacctgaacttgaatatcaataacagttcatcggtcaatctcaatgaagaacaacgtgtgccggattttggggaggaaaacgtatttgatccagattatatggaacaaaaccaaatgttggaaacagaaagtaggtacactacggatgagtttgacttttcagataatcaggatgcagcatccagtaattatagcaatgggcaaaccaaccgaacagtaactgaaaccctttctgccagtgacagaaatgacaagatcccacattcttctttatttacaaacttaaaccagcttacttcgaatggaggaaactatcaggatagggaagatttctctggtgatcaaataaacaaacctcaacaatctcaaccacttcatgtgaaaggaccacaaacttcgtcatttggttacagaaattcttcagccaatagctcgcagcctcaagcaccatacccggttggtcgcccgttaggtaagataagaacgggtccgctgaccgtccagcctatgcaacaaggtggaaactcatcaatgtattctttccaatcttcgcaacatcggtttcattcgtcgcaacagcgccaaaaccaatcactttccttcagaaacaatacctatggaagtggtaacaatcaaaatacattccatccatcgccgcaactgcaacaacagcctcaaaatatgagatatttgaataataagttaccaataaatgatagatctccaataccgcaaacacagcaccatgtaccagatggccgtcccagcctccatataaataccactaaccgcacaaatccgcttactgcacaaagtggattttctcaatttatgcctcccaatagcacatcaaccaacccatattccagctgattcatttatatttcatcttttcttttttttttttttacaattcagtagttttatataacttcccataaatgtattatttttttaatacgactataatatacctctatacccttatttatctctttacctttgcttttaagctaaacaaatcttcattaacaggtattatattactggcgtcgcgtttcgtttaggcgcatcgagccgagacttcagaatcacaaatgctttgtatatatgttacgtattcagtattgcccaacatgcaactagattcaactaagcagacgtgggtacttacatgagaagcagatcattgaaattttactaagttaaagaagaggaagggctccaatgattgtaagaatgatacgtctttgtaaaggtccaaagttgttgcgaagtcaattcgcatcagcaagtgcactatattcaaccaagtcattgttcaaacctcccatgtaccaaaaagcggaaattaatttgattattccacatagaaagcactttttgttgcggtcgattcgattacaatcagacattgcgcaaggaaagaagtccaccaagcccactttaaagttgtccaatgcaaattcaaaatcctcggggtttaaagacattaaacggctattcgtcttatctaaaccggaatccaagtacattggtcttgccctccttttaatcctcatttcaagttcagttagtatggctgtaccttccgttatcggtaaattattagacttggcttccgaaagtgacggcgaagatgaagagggctcaaaaagcaataagttatatggttttacgaagaagcaatttttcacagcattaggagcagtatttataattggagcagttgctaatgcaagcagaatcatcattttaaaggtcaccggtgagagactggtcgcaagattaagaacgagaacaatgaaagctgcattagatcaagatgccacatttttagatactaatcgtgtcggtgatttgatctcaagattatcatctgatgcatctatagtggccaaatcggtcacacaaaacgtctctgatggaacaagggcaattattcaagggtttgtcggttttggcatgatgagcttcctctcgtggaaattgacttgcgtaatgatgattttagcccctcctttaggtgctatggcactgatatatggtaggaaaatacgaaacctatcaagacagttacaaacctcagtaggtgggttaacaaaagtggcagaagagcaattaaatgctactaggacaattcaagcatatggtggtgaaaaaaacgaggttcgccgctatgcaaaagaggttagaaatgtatttcatattggtctgaaggaagcggttacttccggtttattcttcggaagtactgggctagttggcaacactgcaatgctgtcgttattattggttggaacaagcatgattcaaagtggttcaatgactgtcggtgaattatctagtttcatgatgtatgccgtgtataccggaagttcattatttggtttatcgagcttctattcagaacttatgaaaggtgctggtgcggctgccagggtttttgaattaaatgaccgtaagccattgattcgtccgactattggaaaggatcctgtgtcattagcccaaaaacccatcgttttcaaaaacgtgtcattcacttatcccactcggcccaaacaccagattttcaaggatttgaatattactatcaagcctggtgaacacgtttgcgctgtcggtccatcaggaagcggcaaatcaacaattgcgtctttgttgctcaggtactacgatgtgaactcaggatcgatcgaatttggtgatgaagacatcagaaatttcaacttgaggaagtatcgaagactaataggatacgtgcaacaagaaccactacttttcaatgggactattctggacaatatcctctactgcattccgcctgaaattgcggagcaggatgatcgtattagacgtgctattggaaaagctaattgcacaaaatttttggccaattttccagatggattgcagactatggttggtgctagaggcgcgcaattgtccggtggtcaaaagcaaagaattgcattagctagagcgtttttactagatcctgccgtccttattttagatgaagcaaccagtgcccttgactctcaaagtgaagaaatagttgccaaaaatcttcagagacgtgtggaaagggggttcactactatatcaattgcacataggctttcgacgatcaaacacagtactagggtgattgtgttaggaaaacatggctcagtggttgaaaccggttcattccgagatctaatcgccattcctaatagtgaactaaatgcgctgcttgccgaacagcaggacgaggaaggaaaagggggagtgatagatttggacaatagtgttgcccgggaagtataagaagttgccgcagtatggaatcacttttctatgccacagttatggtatgtgttggaagacaattaattatcgcattatgtttgctgaatatgaaattgtgtattctataatttaaatgatgcccaatgtaatttacacaaacagtttttttttaaagctccttgtacgcctttatacacattaaattaatattagatgcacaacatacggtacgtttaggaaactcaaattaagctttatttttttacttttttattattgttactattattcttattatcaacattatcgttttcatatctttcctgagtacaaatatgactgaaacttacaaaaaaaaaattaattatttattactattaatgattagatgttacgcttttttataaaagtgagagtgatactcggtttaaatcatcgtccacccttcatccgttgtttcagcaggtgtcagtttggttgcatctacattttcctctttcttgcgcggagttttcactcttgataaagtaacgcttcttgcatactcaagttcgttgtaaattgcacttattgcagttttaatcccatcttctttggaaattttcttctttattaatccagctctatccttcattattttgttcgtcgtagctacttttaaagcatctgctaatgtttgagcgttaagtttctttaaagcaataccaactccaatgtcttctactctacctgcataaaagaactgatcaccaaagaaaggttttataacagtaggtaaaccagcacgtaatgaagctccagtagttccagaaccaccatggtgaacggcagcatcgacttgtgggaacaaccaatcatggggaacgtttccgatatttaaaatgtttcttggaagatctacctctgtcttctttgccgccttatcgcccaacctttctgaccatcccttatttaaaatgcagtatacatctgcttccataactgcttcgacaagagcttccgtcatttctttggcattagagactacaatcgaaccaaacccgatataaaccaatttttttccttttgatcttgcctcagaaataaattcttgtaattctgctggcggtttgaaagtactcttatcatcaagaaaccaatatcctgtaactctcacccactcgctaaaatcaattgatggcggaaaaattgtaggagaaacattgtataagaaaggaacattattctgctgtaaaagaaaaagatttgttttccctaaacctagagtttcaactctccacttgtttacttgcccactaattcccttccagaaaacgttttcgaaaaggacatgtgtcaggtagttatagttaccgccccttttttgatctggtacaataaatgcatgtggatatgctcttgttcttgtccatggcatggtaaatgctcgaaaataaggaatttgcaatgcttcagtaatatgaataccaaccatagctgagggtgattcaatcagaatatcaaattttcttctgttacaaacctcccaagatgtctgtaaaagagcatcgatccatcccctaaatttgctcgaagcttctctcagcattttaacattcattgattcattttccaccatcaaggacatcaactccactgggttaccagcaatctcttcaaactggattccatgactttcaacaaagtctctaaattccgaatgtgtaattattaccacttggtgaccttcttttatcaagccctttccaagtgcaatatatggttgaacatcccctcttgagccaatcgtcaataatccaaacttataactcttgtttggttttatgcttgttttatagtgcggattctcatcaatcattaacggtacctcaaagccctcggcattaattttatcttcgaaaagcttcaacttcgctgagtcagggttatgctgaacatcgccaagagaagcactcgatatattcgatccttctgcactgcttgcatatatgttatctaagagctttaaaagaatgcgttcaatatcatccctggcgacctcagtgctaaattcaaaaaatagctcctcgtgaccgtgaattactataaccaatacaaaataaccaaatcgaaatcccttttctttatagcatgtctccacatcaaccaatggcaaaaccatgtatgtattagaccctggtaataacgatctgaagcacaccgtatcattggatacgtaaatcttaccataaacgggaacatttctattcaggtatgtgtagtaagtactgattagtgacttctctttattaaacttgaaatggtacctgaaccgctcgttagcagaaacctcttctgtttctttaatcaaataggtatcatccttttgaaacgggataaacttgttccggtagtgtattggtttggcagcccacatttcggcaaaatttttgaggtgacttggcttccaagctacggtttgctcttgactatcttcttgttcatgaatatgaatcgtggaatgcacagaagagtctatatcattcgccgcatctttatatatttcctccacatcctcaacttgagaatcttcaagaggtttagctctacgaaaccaactattgcttctttctctaaatctgaatcgactctttttcccattttccgaagaaggcacagccgaagttggaacattcaaatattttgaatcctcgccgttattcttttgctcaactgtagctggtgtctcttttccaaaacttgattttgatttcttggctggaatatcataataaagtgtattaacaccggatttctgcaatatagccaactgttcgccaaggctctctttgacctgactaccggacccatccatgaaaacaaacatgaaatcatcgatagcataggtctgtgagctctccaaagctcttaatctcaatgttaaagctttgttgactataggttgatcatctatctctataatgttgggcagcggaatttttaaacttatcgaattgttttcagaattctgagctgcgaactgctcctttttcaaagcgttcacccacgatttagcggagaactctgaatctgcattgaatttgaatgtactttcatctgtgtaaagcttaaatgttttcgtagcactcccgtttaaggtatgtttttgtgtttcaattttttggacctccctcaaatctatggttaaaaccggaaagtatagctcagttgatgaggtatacatagaaaataaatgattctttagtacgcaccaatacctggtagacctaattagttttgtcctgatattaaggtttccagacattttaaccgaccgaggattcttaggtaaatatgcaaagaataggaaatgttttgttgtaataaaaatatggccttgaaccaacacatctttaagtagccatgcagggaaatcattcaaaaatggttcctgttcgtctaaacaaaaccgctgtctcaacttagccacattgtcttttgacagtttttccctagttattgagaagtcgaataaagttggctttcttttgtctaatcttggtacttccggatgcgatttagttttgagattttcctttttgctttttacctcatttcgaccaatgttttcctggaaactatcactggaatcagattcttcagaatcaacttgcgacaacacattcatttcttgagcattattcatccctgcatacacactagcagtagttaataaaccggcaatacttttcatcatatacttggatttcgccaagtcatctgcattatcgttattgtaaccgttttcgtcatcatcactacgggcttcatttggactgtcctgcagttcttgctgctcagacgaccccatcgataaactgctatttgatcttcctctccagcgcttgaacttcgaaagtgaccttgaaaggcgatgatgcctaggggaagtttctggctcagatggcttatcaggtaccaacgaaatgcttggttttggccccgcctcgctatcagacgctgatatgatttgagtgatgggcattcttttaagttatacggattttcaccaaagcataaagtgcaactgaacttctgatgtttactttttgacagccatgactttatcagtgataaatgcaatgactttccgatctactccttctgttgacttttagtcccttttttcttagatgttatgttacagtcacatcagggttaagtttttccaagtcatctcaaaacaatgacctattttatttctagataaaccctggtgtaagcagggttaattttgtcccaaacgggcaaaatataaatacccctttcgggaaataaactaaaaagagttctaattagccaattggcaagaaagctcgatgaagaatcattatgggtttagaaatcagatttccttactttacaagttctctcacgcaagcttgatcgtttttaaattttctacgttcattcaagacaaagtggttacagatagaagtttttctcacatttagattattttttcctgatagtattaaataacacgtacgatcaacaaattgttgctcagtttaagtgagcctagagaattaagctttattactgctgtattttctgttattttgattgccttgggaataaaggaaaggtttggaggggcacatcttcctaaatagcagtaaggaaaaagaatcgcgtgtgaagtcttttaaatcaacatagttatcctcggttccaactattttactttcgtttcaattccgttgttcttaactaatcttcttttcttttaacttgttacaagccagtactcattgcaaaatcaaaaaaaaaaaacacaactaataaactaaacaactaaaaaaatgaattctccaacaatgaaatcggaacaacttactccaaaactctcaccaatgtccttttgtttggatgaccaaagaaatgcaggctcttttcaaaatctattgaactcacctacgaagctaaaattagacactggcccgattggtaattccttgttatatccaacatcactctctaaattgagcgagttatcaagaggtggacgttctaaacaaagaaggggctctgacactatgaggtctgtatcgcctattaggtttcagtttttgaacaacactccaaagatgttaaaacccgagtacctatctcaaacaaccagtaatctgccattgctatctgccctattgaagaatagcaagaaaactactagtgaaggccagaattcaaaccctgatccattgaacatagagaaaaacatcattaaacaaagcatcaaggacaaactagagcagctgcgcagttcagaatccgttgcgcaagtacaaaagaaagaacgcaatcccccttcatttgaggccaaagtctgtgcggaagaaccgatattacggaaaaacgccgaagggttgctcccctcatacgttcctgttcctgctactcctttggaagatccagaaaatcatggggtgcgaaaggtcgaggacaaaggacttagagtcgtctccggcggctccactcagtgtctaagcaccgaagtgaacgaattgcctaaggatctgaatctagacaatttacctacggataataacgggttcgttcaatatggtctcaaaggcaataacaacaacaacagatatagctttatctcgtctacgtcgacggactatgagcccgaatggtgtgacggacaacaacatatttcaatgcaaatggcctctatggccaatgcagaggaggcaaatagtcgtgaaaaatcgaatttagacataaagatcaagcagctagaacttgaaattacagaattaaagttgcagaatgaaaaattagtgcattccatgacgacgaacagatacattgaagaaagatttatgcttgaggttatgaaggatcctagtatacaggctcaaagatcccaaagagatattgagagaaaagtcaagcaactggagaaaaaattcttcaattgtaaaaaagttcttaagaaattgactgaatcctccgcagtagtggccacctccacttcaaaaactgaaggaaattcagcaagaatcccatgccctaagactagactggcacgcgtttctgttttagacctaaagaaaattgaagaacagccagattcttcttcgggaacttcgtccgaggaagatcatctaacaaacgatgatacggatgctaatactagcgaagatttaaatgttgcttttgaagaggagccaacttctgctatttccacaacagcatctgtgcagagtggggaaagtaaaagaggtttccaacttaaccttcctgtccaagtggagaagaaggaaaaatgaagcgtcaacttcaaattaaattaacttattttacacaaacattcacaatacatcaatgctgataggcgctttgtattgtaggctatcgagttacgcatctgcaatgtgcgtgatttctccgttatccatccttctcattggacaatttttatttgaatattactgaacttcaaagggcttgtcgtgtgatttaatcttttttcttacaacgtcgaatgctgcagctatttattcatagtgtcgtctaagcaaataccccgcttttaaaagctgaatagaaaatccaatcacggtgtgactggtatcacaaacacataatttatatattgcattcaagtttattcaacctatacttaaatacattaattaccaaaaaaaatgatataataaagtcttcttttatctgattaatgacacctttttcagcgggccaaattttttttatttccgaagcccgccggactaatattaattatatcagatagttggtgagcaaacgcatgtggaaatgaacaacaatttcgaaagtgcatatactatctataaatatcaaggggattctatactataacaatacctgcgatgtcatccacagcagtaccacgacctaaaccttgggagaccagtgcttcgttagaggagccacagcgtaatgctcagtctttaagtgcgatgatgacctcgaatcagcaggattccaggccaactgaagaaagcaataacagtaatagtgcaagtgagtctgctcccgaagttttgccgcggcctgcggcacttaactcctctggtacctacggcgaatcgaatacaataccgggaatatacggtaatagcaattatgggataccctatgataataatccgtatagtatgaactctatatacggaaacagcatagggaggtatggctatggaggatcgtactatggcaacaattatggatcgttttatggaggagggtacggtgcaggagcgggatatggaatgaataatggaagtggactaggtgagtcgacgaaggccacctttcagttaatagaaagtttgataggcgctgttactggatttgcacaaatgctggaatctacttatatggccacacacaactcgtttttcaccatgatatccgtcgcagaacagtttggtaatttgaaggaaatgctaggttcattttttggtatctttgctataatgaagtttcttaaaaaaatactctatcgtgctactaaggggagactaggaataccaccaaagaatttcgcagaatctgaaggaagcaaaaataaactaattgaagattttcaaaagtttaatgatagtggtaccataaattctaatgagaaagccacaagaaggaaaatttcatggaaaccgctactattttttttgatggcagtatttggttttccatatctactaaacaaatttattactaaactacagacctctggaaccatacgagcatcgcaaggaaatggtagcgagcctattgatccttcgaagttagaatttgcaagagcgttatatgattttgttccagaaaacccagagatggaagttgctttaaaaaagggcgacttgatggcaattttgagtaagaaagaccctcttgggagggattctgactggtggaaagtgaggacaaagaacggcaatattggctacattccgtataactatattgagatcataaaaagacggaagaaaattgagcatgttgatgatgaaacgcgtacacactagtgcatcaatatttgcacacatatattcgcatatatatatagtaaaatctaaagtaatgtaaatattccagggagaatcagcagaaacgagacgaagtacttcttaacaaaaagccagataacggtgcaaaaacacattatattctccatcttgaaaacacaatctcctacgtacacatatgcgtatttatttttatatgaatgaaacgcctatggatatatatatgggaatatagacattcacaatttcaggacaattgtgatatggcaatatccaaggcctgcggtgctgggcttcgctttttttcaccaacaaaatgagatggacaagtttatcatagcaaagaaacaataagcagattacataaagtcgtcatcaccgaattcaaaatcgtcggggccatctaggtcgaaatcttgatctttcttaaatgcgccacccaaattggtcttacctttgactttcttcttaccagcacccccagtagcagtaccacctctaacacgggccagacgagcttgcctctcctctctttccttatctttgatcaaaacgttcaaagtagcaactgtttgtcttatagattcgatggacattggttttgctacatctctaatcaaatcaatcgctaacgatgaggagtagttcagcggagattttttgttcattggtgtaatagcagcagtaagagcctttcttaaatcctggtactctctctttgtttcggcgttaaacaaaggatgtgtttcgataggtgtgtccttggtaaaggcgggtctttttagagcttgttcctcttgttccttttgtaaagcacgagcccttggatgttcttcggcaacacctaaacccgcaaacaaatctgcagcattgtttaagtcagactccatttcagcctttttgattaattctttacgtgtcttttcatccaatgtgtcaatatccaatagggctctgtcagcggaggattctttcccttttttaaccttttttggttgttctttttttggctttggggcaggcttcttttcttcctcttctgcatcccatgattgcatgacaggttcgtcatcaccaatttcagcatcccatgagtccatcaaaacggcgtcatcattacccatagaaccattgatagcttcgtcgtcccaagacatttttattacttttttttttttgaggtggtggttaggatagaatagttacaaggaactcaaaagatagtaagataatttaaagcgagagttcaagaatggtgggagcagtcagttctcaattctttaatgtagtacttctgacttagctagcatgaaaaaaaaattcggaaaatgcccaaaaacaggtgtgttcgtctaatatgatacagggacgaccataatatcaagattagtgacatttgatgtatagtttagcagaatgactgttataaataaataattatatatgtgtgtatattaaattttgttgaaccagcgcttatttacaatttttaggacgtgaccaaatgcgagctgcactagttttctcaatttcgctcgcccatggtgatatctttaaagatctttaaatgggaacatcaaaactgaggatttctcgcctcttcgagtttttggataacaaatgccatgcccattctgcttttcttaacgttttcgtcaaatttagtgcgcgaccaatcctctaccttagatttgatacccatattgaagccacttgaaaacttcacccggctgtctgctatcgtactacttgtagcactgtcaaattgataggtagtatattcttcaaccttcatgattccagtgtgatccagattcctagtgtaagttttcattgtggagttagcggggttcactacggaaacttcgattatccatgtttctgttatacctcttaaaaagggtttgacccatgtgggcagctttccggactttttcaacagcctcgttgtgcgcaaatttccttcttgatcaacgttccttgatattgtgtctatggatagtacatggggggagtatggattggggtatctattaaaaaaggcgcgtgaaacagaggcaaaatcggtaggaaatatatgtgtgcttttgtgtaaaaggaccattgcaactcttaaggatatcttaccgccgtctcagaagccagacaatacttattgaatatgattactcatccatctgtcatatatattttttttttctagcttattatccagggagagcgagaaatactgcggagtttttcacccgaaagaaaaaaaatacgcaagcacgatgataacaatagttatattattggttacctacagtgtataaaaagaaagagttttattaaaatgcagaactatgtggtggtatacagaactgattatacattctataacaaaagggcaccaacggcgaatgcacccgcaccataagctatgtgagtgccggcaaaggcgccattggtagaattggacattacggacgctaccttaccgttgactgtagacttgtatgtagtggtcagtgtctctactgtagaacctgacgtagtggtataagttgatttgatagtgcttactaccttggtgcttgattccggttttgatgaggatcccgaagatgatttacttgatgaagccgtgttgtcagttgtggctgaggacggtagccaccaaacagtagatgtgtaagtctcacctaacgaattcgtggtagttactatagtaactggcccgtccgttgatgttgatgtcgttgaggaggatgcggagttggtgattccgcttgacgtctctccggtgggctgcacagaggcagttgaagttgtgcttacggcagagttgctttcggccacccaccataggtactgtgtcgtggttttgccttgtgcatccgtcgtcactacggtggtacttggagccacagcataggtgttgctgacgacgttgctagtttgtactaagctttttccggtagaaactacagttgatgcgctttcttgggcttcctttgtcgtggtaggtgtgatctcttgagagtttgagctttccttttgtgagctatcttcagagttctggccatctaaggaaccagagtctttttgagcagcggctagagtaattaaggtggtaaataatatggaacaggccttcattttatatatatgttgggtttgtttatattttcactagatcggtgagtatctagtccagaagagttgatctttcttacatacttatatatgctcactaccgccttctgagaaagtaggcgtttttcagctacctcagtcgctaaaaataaatgcgagttctcaagccaacttggactccaaggcggtaattatagtgattctctttgtctatttttggatttattttggaggctgacactctaaagccagccattggattaattattttttcacttcgtcaattgactatgcggaaaaactaaatgtggtcaaattctgtcggctatgtacacgaaaactatatacgcctcgtcctttcagccactacaacataacaacaccgacattgctacgccttttaatgtcgttactattgtcgggattcaagccaccggtaatcggctttgctctataattaaataaatagaagttcaagaacccgtcaccgggcccgaacttcaaatcatccaagaacaatgtattatcttgcgaagtcaacgcgttaaaaacatccatattagcgtttttggccaaaatacaagcgtcataaatcaattcacacaatcttgttttcaaagccttagtagcttttggatcaaacctgtctttgaattggaaatctgcatcggtggcataataatacaagtacccgatgcctaggtccttatattttgtgttatttaggattgtgaatggcaatgagtaaaatgagaagaagtctgtaatttttccatcgggctgttcgactacatatgagaaaattacttgtttatccaatggtaacgattcttcaccaatgaaattatgttcgaattcttcttttgtgaaaatttgaattagttcgaacctggattgatatcttttgaacaactcaaaaacttggtcaatatcttccttctttaattttctcaatcccgctgtctttgttttggccggtaacgcattctcagcaatcatatcctcctctgtgtgcccatctggtaaccctgtgaaatctacttcataaagtttcttccaattcaagggacgatgagtataacgacacgtactcacaggtgctggcaaaacaatacctgccgtgtacaatgcatgccagatgtcacatttgttcactcgtctcgtaatttctttaattagaacaggtgttaatctcttcgatcttagctgtttgtgaacgcacaagaaattgatttctacactaggcacttgtttacctctaacaccaagtgttactggtatggctgagataaaggcaactaatttctgtgtttctttaacgcgaacaccaatatgccaatccttcttccaacctggactctttaaagcccaattgaagaattctttggtatagttaaatctgaagcctgcatcgcggtcttccacgtagttttcatttagtagaacgaaaacatcttcaagctgttttttgttgtccacatcaatactacaccattcgaagctagacaataaaggtagtggcttgtcagatatatcttccggtgtctttggcttatcaatggggccttcttccaccaccttttcatcgaaatctttgaccggttgcgttctccagaatttgtggtctttcatagcttttttctgttcttgagtgaattttgaagtatcgtcattattcaactgtaataacttcaataaattctctaattttttcgctttatcctcttctgacattctataaatacgtttactaccgaagctctatgacaaccagagctattgtacagatcattctctaaaaagcgtgcaacacatatcatcttcaattatagtgaattacttttatcatgagcaacggctgaaattattttatcctattgttttatgacagtatcctttcaaaagagtcgaaaggatcctctgttgcaagaactactattacgtaattatacatagtccgcctgcaatttctagtgagactttgctttgctttccactttgcgattaatattgagaattttaaacgttaactgaattcttacccacccataataagaactctaactggcgaatttatcatgaaacaaatctgcaagaataaaaaattagagaatcgtgcaattcaatttaattgccttgtccgttgtaaaacttttccataggccctaccttgagttgatcatatgtattattctatatatattatatccagtcgggtaataaattttctcgccctcgaaaaaaagaagtgaaaaatttgtctcgatgagctgagatgagtttgaaagaagcaaagagttttaatttgtaaacgatagcaagtgtaccctcagttgagtctattacgccttccttatttggaaacttagaagacgaataaaaaaaacaaaataactaatgatttctgctactaattgggttccaagagggttttcctcggaatttcctgaaaagtatgttctggatgatgaggaagtggaaagaattaaccaattagcacagttgaatttggatgatgctaaagctactttggaagaagcagaaggcgaatcaggtgttgaagatgacgccgcaacaggtagttctaataagttgaaggatcagttggatatagatgatgatttgaaagaatataacctggaagaatatgacgatgaggaaattgcagataatgagggtggtaaagacgtttccatgttcccgggtttaagtaatgatagcgatgttaaattccatgagggtgaaaaaggtgaagatccatatatttcattgcctaatcaagaggatagtcaagaggagaagcaggagttacaagtttacccatccgataatttagttcttgctgcgagaacagaagatgacgtttcgtatttggatatctacgtttacgatgacggtgctgggttccacagtagcgatattcccgttgaagaaggtgatgaagctgacccagatgttgctcgtggattggttcgtgaccctgcactttacgttcaccatgatttaatgttgcctgcttttccactatgtgttgagtggcttgactacaaggttggatccaattccgaagaagcagccaattatgctgccattggtacgtttgatccacaaattgaaatttggaacttggactgtgttgacaaggcctttcccgatatgattctgggtgaacctcttgataattcaatggtgtctttgaaaagcaaaaagaagaagaagaagtctaagactggacacattactactcatcataccgatgctgttttatccatggcacacaacaaatatttccgttccgttttagcatccacctctgcagatcataccgtaaaactatgggatttgaactcaggtaacgcagcccgctccttagcttccattcattcaaacaaaaatgtttcatcatctgaatggcacatgttgaatggttccattcttttgaccggtggttatgattctcgagtagctttaacagatgttagaatttctgacgaaagtcaaatgagtaaatactggtctgccatggcaggtgaggaaatagaaactgttacatttgccagtgaaaatataatattatgtggtactgattctggtaatgtgtattctttcgatattagaaacaatgaaaaccgtaaaccagtttggacattgaaggcacacgatgctggtatctccacattatgttcaaacaaattcatccctggtatgatgagtacaggggccatgggtgaaaagactgtcaaattatggaaattccccttggatgatgctacgaacactaagggcccaagcatggttctgtctcgtgatttcgatgtcggaaatgtattgacatcgtcattcgctccagacatcgaggtagcgggtaccatggtcattggtggtgtcaataaagttttgaaactatgggacgtttttaccaatagatctgtacgtaagagctttaaaagtgaactagagaatgttcaagcaagagcaaaagaagaagcccaaaaaataggaaaaagttcaagaatcgccagaaaatacaccagtaacgataacccagatactgttataaccattgatgatcaaggtgaagatgaagaagaaagagaaggtggagatgagcatgatgacatggcataatctggatatgaaaaatattaaagcagagtacattgcaagtacaaataaaaaatctatagaagataatactgtatactagtgtaagaggagcctcagaaaaaaacaatataatacattaatatgtgctgttacggtataatttagcatatgatgacaatgtggtgaattacagttgtgtaacttttttatatcacccggcatatatacgctcgtagaatgcgatgtgaaaattttctttttttttttttttcaaagtgaaatttttttgagtgatgagatgggaaatgaaaaattttgtgcaattgcgtagtgtctacagttttttaagtagttattaaaagtgttttggaaggtatatttctaggagaagaagcgtgcagaacagtatttagtgaaagatggctcctattgaatacctactgtttgaagaacctactggttacgcagttttcaaggttaagttgcaacaagatgacattggttcaagattaaaagaagttcaagagcaaatcaatgattttggtgcttttacaaagttaatcgaacttgtatctttcgcgccattcaaaggtgctgctgaagcccttgaaaatgctaacgacatatcagaaggtttagtctctgagagtttgaaagctatcttggatttaaacttaccaaaggcttcctcgaaaaagaagaacattactttggctatttccgataaaaacttaggtccttctattaaggaagaatttccatatgttgattgtatttcaaatgaacttgctcaggatttgattcgtggtgtcagattacatggcgaaaaattattcaaaggtctacaatctggtgacttagaaagagcccaattaggtttaggtcacgcttactccagagctaaagtgaagttctctgttcaaaagaacgacaatcacatcattcaagctattgctttattagatcaattagataaagatatcaacacttttgctatgagagttaaagagtggtatggctggcatttccccgaactggctaaattggtaccagacaactacacttttgccaagttggttctttttatcaaggacaaagcttcattaaacgatgactccttacatgatttggctgctcttttgaatgaggattcgggaattgcacaaagagtcattgacaatgcccgtatctccatgggacaagatatatcagaaaccgatatggaaaatgtttgtgttttcgctcagagagtcgcttccttagctgattacagaagacaattatacgattacttatgcgaaaaaatgcacactgttgcaccaaacttatcagaattgattggtgaagtgattggtgctagattaatttctcacgcaggttccctaactaatttatctaagcaagcagcttcaacggttcaaattcttggtgctgaaaaggctttgttcagagctttaaaaactaaaggtaacactccaaaatacggtttgatttaccacagtggttttatttctaaggcctctgccaagaacaagggtcgtatttctagatacttggctaacaaatgttctatggcctctagaattgacaattactctgaggaaccatctaatgtttttggttccgtactaaagaaacaagttgagcaaagattagaattctacaacactggtaagccaactttgaagaatgaattagccattcaagaagccatggaactttataacaaagataaaccagctgcagaagtggaagaaaccaaggaaaaggaatcctcaaagaagagaaaattagaagatgatgatgaagaaaagaaggaaaagaaagagaaaaaatcgaagaaggaaaagaaagaaaagaaggaaaagaaggacaaaaaggaaaagaaagataaaaaggaaaagaaggataaaaagaagaaaagtaaggattaaaaggaacaatgaatcgaaataaagtatatcccatctttttgtgtacttttcttccctttaaagtttttcatatatatatatattatcttttattcccttctaatattcttctttaggatttggaagctgtatattgtatatttagaaatattattaaataaaaaagtcatatgttattttgagcttaagtaccctcttatgcctctttcactcgccattactgacattctgtgatcgccattcatatatataggcctgattgtgcaccaattgccgcgctatcacacctccataagcgatagcattcttcagaatatcttgaaggctcaaaaccaagccattgaccgcacaaatcaactaaagaacccatgtcagacaacgaaagtttctcaaatccattaggcccctcactaggcgctacaagacatttaaatttcagtcccttactgggaccgacaatcaattgtgttagcacacttcctatgaatcccgttataaattctggtggttgtagtgtacattcattttccgtcattaccttcatgctggcgattttatcagaggtgccaattactattatatcaggggagaactgggctaactgtgatatgatagatctacttatcatgttaccaaaaatcggcgatatactaatgaaattctcctccatagaaaataataacgtctttccaaatgaataaatcgggaaagaaaaaccatatactgtttcatcggcggtgtcatttttttgatcaggatcaacctcgtttggaaagttttcgtcgtaattccacgagtgtttacctgaagattggggaagacttggacttttcaccgtcaatgtagttttaatttcaccaatagaggttaattgaagcagatttttggggaataatgggttcattatcttagtagtaatgacggctgtcgaatattgaggaacatccaagtcctgaggaaactcaacttttggaaccgggcagacttctaaagattgcaggttttttgaaatctctgggagatctagcagatgttttggttctggtaagtcattccattgtttaaacttcaaaaagaatcaagtaacataagttagtcaaaccactctactctagcaaaatatgatggggaaaaaagattattgtaacatacaagcatcgctataaatgaaaattttactgtagtgcgatgatatcttggtcgctgtttcttattatttcgcctgttgccacctattgccacgcaacttcttaaattgatttcaatgaagtctgaaattttgatgcgaaagaaaaaaaaaagtaaaggcaataaaacttcatcaagtcaaacgtcatctataaataatcccacttcagaattgaaaaagactacatttgagtggaggaacaaaagcaaaaatgtctgaattaggtgccaaatatcaacagttgcaaaatgagttagaagagtttattgtggccagacaaaaattagagacacaattacaagaaaacaagattgtaaatgaagagtttgaccaattagaagaagatacacctgtgtacaaattgacaggcaatgtccttttaccagttgaacaaagtgaggcacgtaccaacgtggacaaaagattagagttcatcgaaacagaaattacaagatgcgaaaagaacataagggacaagcaggaagaactagaaaagatgagaagcgagctaattaaactgaacaatacagcagcttccactggcccaggaaggtaaaacaaactcacaggtcctcggaaagacaagaaagcgcacagtaccaataaatctgcccaaaataaaattttcttttatatacaattatgtaacttacaaacaaaatacctacgcatttcactgtcctaaacttcaaattgacatgtaagattgcttaacccctaactaattgagatttgattaaatttaccgtagacattaacgtataccaggcaaactcttcagtattgttatagtactcacccaaacgcatgaccctatgtaatttatcctttgcaaaagtaaacgtttctttgtaattgtgggatttatcctgagccataaataactttgaaccaatgtaggtgctcgaaacagccaatctcttagcataccatgcagaatcatggtggtccttttcgttggaaaagtaaatcatatcatcggacaatctgtgtagttcaggaattgcagtttcaaagagaaaggcgcttggaatagccaattgtgacattagttccgacaaatgcccaccgattggcttgtccatctccaatctttttaacagcaaatgttctaatgagggtagtttgtattgtggagttacgtcagggttgattccttcagttaaacgataccttttatctaccaattgaaactttatcagttccatgacagcggtggaagaatggaaaaacgagggcgagttgggagcacctattgaagagatcatggaggaaggatagccgagctcatttaaagattcaacaatggatctttcagagaaaccgtgctcgggaacaaacttttgtagagctagtgacaatactttatactggggtgattcttttccataagttaaaggtttaatatgaattggtttaacatgttcgatagggttcgaatgatataaacgaaagaatttacagcccgttctggcagtattgcgacaaagcatgatttataatgtggtaaagactctgttatctctttccaaattggggtgaagtaccttatgtaggcccaaaaaaaaaaaaaccccgtattattgtttcttactattgttattgctatttttcttccgcctaatatagtccgaaaaggaaaggatatgtcatggcaactgtagtcagtatactactgtataggtgaatggattagttaatggactattaggtcaaccattacgaagggggtggggttagtatttttgtatttacagatattgagatatcatacataagaaaaaaattataataacggtagaaaacgcatatatttataagatgaaagttgggcatggcctcccgataatcattgtctcttgattgtatggtaccttttacctctgaacccggcaatatacatgttaaattgataaacttcttgaggattcatgtcatttaattcccacttcgtacttccaaatacgtttctgacgggctccattaagacatccatttccttaccgtatttggatttgacaagatttatgtcgtccgttaggtctttcttattgaaacccgttgtgaagatagcacattttgtttccagtaatgccttcatagtttcacccatccatgaaccgtgagattctggagatgcgtagcctggatggaaagtaaaaaagacatccatgtatggatcgtatgggaaaaaatcttgagcctcatggaatacttcgaaaaagtttgtacgataaatgaatttcagagtctcgtctactctttgtactaccggcgtagtagacttgacgtactcctgtttatcccttttatacaggcattcgggtccaatgaaatgtatttcgaaactctgctctgggaaaagaaactggagctgtttccaaacgtggcccggcaattgagcttcagcacgtgcacctaggatgaaaattctcatagcacggttcttagttgtggttggtaaagatctattctccaacggatataaagtatacctgagagcagccagagattttagaccttctaaggtgataggcccctttgggttcaatgaatacggggaaaatttgtgcagcaaagacccaatcgtaattggatagcttagcatctttgtgactgcggctaattggaactctgtatccatggaatagaatgatcttgtgtagaaaaacaaatcccagtttgttaggttaacggccttgtcgtagccttgctgttggggaaaatcaaactccgggaagggtctaccgcttcttaagtcatgctcataaatattaacttttttcaggatttcatattttttagaatcgtgatatgctttatccatctcccaagcctctcgtgagtgatgagtcggaattcctgacagaggacaagtgtagttaatatctttgccggtaacagggcagtgtgctagcgttctaatcttggcggccctttcacgcaagtccactgagggagactgatcccatggatggaatctgttctccggagtaggatcttctggagagggaggaggatccaatccaagggcgttcctaacgaaccccatgaggtgacgacgtgtttggtgagagacaactagcctgttgtgtggcgacttccttagcagatggaaatatagctgagtagcacccgaaggagcatatagcacggtcatagttctggaagtacaagtttgccaaactactttaagtccaccttcgcaatatctacagtgttctgcgcttataaagtgtaaaaaaactacaaccaaaggcccgcccttagtagttgaccaaatatctactattgtctcttgtcagactcctttggattattttcttcgagccgctttttcgtagcgcatgataaaaagagccctttccccatactgcacacttaagtgaatgccaaatataatatcaagagcgaaaggcggttgagttccagccaagacgagcacacacgacaccagaacgagataaacatgctaggaagggcattgcgacctgggtggctgggcattactaggacggtggttaagaaaccaagttgcgggtcctactttaacagaacctttcaaacagcaattaacactacaatgcctcccatgcaagagggcatgctgagtacaatgatgatgatgacggctacggcaacaaggatcactggcacagtcagtgagccattaaacggttcaaatatagtgatgcaactcgattcagtgatgagaaagaggaaaaaaaagatgaagaaacacaaactgcggaaaagaagaaagagggagaaggcagaaagaagaaagctatctcagggtagataatagggctgtaaaaacctctcacatgtttttctctgctgtttttccttccctattcttcatattttgatattatttcatgtatatattatgtttgtatttagacttttttttttatacgttatactatgctaagaaaactctttaccaagaagtaaagaacccagatcgcgataatagaaagcaccagcagcatgaccgtgtggagtgctcttctagtagcagaatccttgttgaacatccattcttcgtacaagtacgtaatacacttgaagctgaacttgcccattaactcgcgacgattcaactctccaatttctgcaacgatgttgaagttccaatcaaaaatgccttctgcgacgctaatgatctgcaacttttgtgcttcggtcaattccgtcctggtggccagctcatagttcttcttgtattcccatttcaagcgtgtttcttcagtgggacccagatcgctgaaggtgaagaagtttgtgccctttttgaccagttccttctgtgatagcttctcgaagttggggaagagccccagtcttctgtacaaattcgatcgtattagcttgccgccggcgaaaagcgccaagtacagaacgtgacagtaagaaagaatggtgcatggctccttgtgtatgttttcgtggatgttattgataaactgctgtagtagcggtggcttctggaacgtagccaggaattcgtttaatgattctgtgcttttaaacgtgtttgagtatagcagcttcaggtccttatagatctgcgtagatcttctaaaatcttcgagccaaaactgcttcagaatggtcgaagtttgcagctcctcctccgttacggggtcattcagtaggcgatctatctcttgctcgatggcatcgaacacataatagtacgccagaataccctgtctgtatataaagccatgtctcatggcgatggccatctttatgcccatgaaggtattgattttattgtgggcatctctggtttgaaagttgattctgtttgctagcgcccccacgtcagtgggtgagggtatgattgtattgctactgtcctccatttttgcggttattttatgtgtgtgtgtgtatatatgctgtgttatattgtgcactgttaaatagctcctccttagactaagcaagagagtatgaggaggttgctcttatatacaaacacaagagggcgagaggggcacctggccattgctccatcacacccaactcaggtgtaaatcgtcctacttatgaaggtcattagcccatgtttgaaaccgtgtgttacatggctcaaattccacggtccgataacgccgaccccgagcaggtgcaaatggccaggcggtatcgccaatgatccgtttatctaaagatagatagatggccgaacgtggactgcctctatgggtacaataacatatgcacatggcaacgggtcttggtgctcaatcgacgggcacatacaccctgactttccccatcatacgacgatgctctagtaaacttgcacccgcacctgttagataaacaagtgcgcccaagatcacaataccgaaggggcgatatcaccactcagtattctacagtcgagcatagcgtagtctggcagtatcccgcacgatccattgtattgtttgtccaaaccgcattttatgtgtaacgattaatcgtatatacatggcctacaagaaattaccctgcggcgaagggtgaaaaaaaaagtagtggaaactaaagaaagaagagtttagttacggaccctttcaaggattgacacactcccaatattttgctacattattgacctttgttgaaggaggcgttcgtttatttaattattttgttctgttttgcctacaactgcgaatacgctcacattctagtttgaccttcacaaattcttatcatcttcttttgtttattttgacacacccctattaagtgtatttgttttgtaagtaatgtctaagcagtttgttcgttctgcaaagaacatgatgaagggctactcatccacacaagtgcttgtgagagatgccacggcgaacgactcgaggactccatcgatagacactctcgacgatttggcacagagatcttacgattcggtggacttcttcgagattatggatatgttagacaagaggctgaacgataagggcaaatactggagacacgttgccaaatcgctgaccgttttggactatcttgttcgtttcgggagtgagaactgtgtgctatggtgcagagagaatttttacgtaattaagacattaagggaattcagacacgaaaatgagtccggatttgacgagggacaaattatcagagtaaaggctaaagaactcgtctctttgttgaatgatgaagaaaggctacgcgaagagaggtctatgaatacaagaaacagaagggcgaacagagctgctaggccaaggccaagaagacaaagaacaaggagcaacccacacgattcttctccctcttaccaggacgatttggaaaaggccctagaggagagcagaattactgctcaagaagatgaacaacgtagaagagaactggcccagtacgacgatgaagatcctgacttccaagctgccttacaactaagtaaagaagaagaggagttgaagcaattgcaggaactacagagattacagaagcaacaacagtctctgtctcaatttcaagctcctttacaacaacaacaaccacaacaacaaccagcgtactacgacattttcggtaatccaatctcccaagatgaatacttacagtatcagtaccaacaggaccaggaacaagcaatggctcagcaaagatggctggaccagcagcaagaacaacagcagcttgctgaacaacaatattttcagcagcaacaacaagctgcggccgccgcttctgccttgcaacagcaacaaacagccgctaatatgcaacaacaacaacaacagcccgctgattttcaacaacctttgcctacaggttctaataatccgttttccatggataatcttgaaagacaaaagcaggagcaacagcatgctcaattgcaaagacaacaagaagaagctagacaacaacaagaacaattgaagctacaacaattgcaaagacaacaacaagaggaagctcaattacaccagaagaggcaagaagaagcccaattacaacagcagcaagcccaattgctacaacagcaagcccagttccagcaacaacaacccttgaagcaaacaaggactgggaaccagtctatatcggataaatacagcgacttgaataccttgttagcaactggtacagggatagatacttttggtaacactggagaggcacgtattcctgcacaacatacaaagacaggcacatttataaattctcagggtacaggctacaaacaggttactaatgaacccaagaacaaccctttcttaagcaaccaatacactggtttaccaagcacaaatatcgtgcccacgcaaacagggtacgggtttggtaaccaacctcaaagtcctcctactaattctcctcagcaaaatcctactggtataagctactctcagccacaacagcaacaacagccacagcaacaaccgcaatacatgcaaaatttccaacaacagcaacctcaatacgcccaaaacttccaacaacaaccacaatacactcaaaattatcaacaacaaccacaatacattcaacctcatcaacaacaacagcagcagcagcagcagcaacagcagcaacagggatatactcctgaccaaggtgtaagcttaattgatctttgatactgtcctatatatacttttttgtcatgggtacacatacatgtacgacatatatatatatatatatatatatattagcgagtttacattgatgtagagcagtaactggaagaaataaaaatttaaacttaatactagggggtccgtcttctcgtgggtacttcttttacagttttcaacttctgctgacttgtatgccttcttggcgcttcttcggaaaagttgacagcgggctttactttaacggcaaatcgcagtaagtaagcaagtaacgaactcgcacttcagcaaaataaaaaagaacaatcgattagaaattcaaatttcaccgtgactctttaacccctgccgaatattataagcaaactatgataacactcttattatacctgtgcgtaatatgtaacgcaatagtgttaataagggctgattcgatagcggacccttggcctgaagcgcgacatctactaaataccatagctaagtccagagacccaatgaaagaagctgctatggaacccaatgcagatgaatttgttggattctatgtaccgatggattattccccacgtaatgaggaaaaaaactaccagagcatttggcaaaacgaaatcacagattctcaacgtcatatttatgaattacttgtacaatcaagtgaacaattcaacaactcagaagcaacatatacacttagccagattcacctttggagtcaatataatttcccgcataatatgactttggcacacaaatacttagaaaaattcaatgatctaacccacttcaccaatcattcggccatcttcgacttagctgtgatgtatgccactgggggatgtgcttctggtaatgatcaaaccgtgatccctcaggattctgctaaagcactgctatattaccaaagggctgcccaactagggaatttaaaggctaagcaagtgctagcttataaatactattctggcttcaatgtcccacgaaattttcataaatctttagtattgtacagggacattgctgaacagctgagaaagtcgtactccagggacgaatgggatattgtcttcccctattgggaaagttacaacgtgagaatatcggattttgagagtggcctattaggtaaaggtttgaattccgttccatcttctacagtaaggaaaagaactacgagaccagatattggttcaccctttattgcgcaagttaacggtgtacagatgaccttgcaaatcgaaccgatgggtaggttcgctttcaacggtaacgatggcaacataaatggcgacgaagatgacgaggatgccagtgaaagacgaatcattcggatatattatgcagctttgaatgattataaaggaacatattcacaaagcagaaattgtgagcgcgccaaaaacttgttggaattaacgtacaaggaatttcagcctcatgtcgacaatttggatcctttgcaagtattttactacgtccgttgcttacaattattggggcacatgtatttcaccggcgaaggctcctcgaagcctaatattcatatggccgaagagatcctgaccacgtcgctagaaataagcagaagggcacagggacctataggtagagcgtgcatagatctgggcttaataaatcaatacatcacaaacaatatttctcaagcaatttcgtattatatgaaagctatgaaaacacaagctaacaatggaatcgtagaattccaattatccaaattggccacttcattccctgaagaaaaaatcggcgacccatttaacttaatggaaactgcctacttgaatggattcattccagccatatatgagtttgcagtaatgatcgaatctggaatgaacagtaagagtagtgtggaaaacactgcttacctgttcaaaacattcgttgacaaaaacgaagctattatggcacctaaactgaggacagcatttgccgcattaatcaacgatcgttcagaagtggctttatgggcttattcccaactagccgagcaaggctacgagactgctcaagtctctgccgcctacttaatgtaccagttgccatatgagtttgaggatcctccaagaaccacagatcagagaaaaactttggcaatttcctactatacaagagcgtttaaacagggaaatatagatgctggtgttgtcgcgggagatatctattttcagatgcagaattacagtaaagctatggctctttatcagggtgcagctttgaagtactctatacaggctatctggaacttagggtacatgcatgagcatgggctaggtgtaaacagagatttccatcttgctaaacgttactacgaccaagtttcagaacacgatcatagattttacttggcttccaaattgagtgttttaaaattacacctaaagtcatggttgacttggatcaccagagaaaaagtaaactactggaaaccttcctcgccacttaaccctaacgaagatactcagcactcgaagacttcatggtacaagcaattgacgaagattctacaaagaatgagacataaggaggatagtgacaaagctgcggaagattctcacaaacacagaactgtagtgcagaatggagctaaccataggggtgacgaccaagaggaggcttccgagattttgggcttccaaatggaggatcttgttacgatgggatgtatcttggggatattcctattaagtatattaatgagtacactggcggcccgtagaggctggaatgtccgtttcaatggagcacaattaaatgcaaatggtaaccggcagcaagagcaacaacaacaacaacaagcacaaggtcccccgggctgggacttcaatgttcagatattcgccatatgatgtggtttgtatagatatatacatagactatccatagaaatcacccacgcattacccgaaagttttcaataaagcgaacagcgagaagaaaaaaagcgaaaccgacagagaattaccaccctagagctttaaccccattgagatcaacacaatttcgaacagtgaaagtgcattggcgaaggtgatacaattggcttccagctctgaataataataacttacaagcgcaaagataacagataattttatatcagcatacaaatggtcgtcatagctaatgcgcacaacgaattaatccatgacgctgttctagactattatgggaagcgccttgcaacctgctcttctgacaagacaatcaagatctttgaagtcgaaggagaaacacacaagttaatagacacgttgactggccacgaaggcccagtttggcgtgttgattgggcacatcctaaattcggaaccattttggcatcgtgttcttatgatggtaaagtgttgatttggaaggaagaaaacggtagatggtctcaaattgccgttcatgctgtccactctgcttctgtcaactctgttcaatgggctcctcatgaatatggccccctactgctggttgcttcctctgatggtaaggtctccgtagtagagttcaaagaaaacggtactacttccccaataatcatcgatgctcatgccattggcgttaactctgcttcttgggctccagctaccatcgaagaagatggtgaacacaacggtactaaagaatctcgcaagtttgttactgggggtgctgacaatttggtaaagatttggaagtacaattcagatgcccaaacttatgttctggaaagcaccttagaaggtcacagcgattgggttagagacgtagcatggtcacctactgttcttctacgttcttatttggccagtgtttctcaagatcgcacctgtattatttggactcaagacaatgaacaaggcccatggaaaaaaactttattaaaagaagaaaaattcccagatgttttatggagagccagttggtctttgtcaggtaatgtactagctctttccggtggcgataataaagttactttatggaaggaaaatcttgagggtaaatgggaacccgctggtgaagttcatcagtgaagagtatcaagaatttaaaatgaaacatctcaaaagaaaaaagaatgcaaatgagtctatcgacgaatttgaagggaaataaacgcataatgtacagtaacgtataacaattaaagatttgtggaagttttcaaaaacttttcaacttttttctttgttttttttttgcaacttcttatattaatattgtcatagatatttcttatacaaaaacaagcgaacaaaaataatcgacgtatatacaatagatatataagactgtttttcttcaatagaacaggcgaaattattctaccggccgaaggtacatcttcccgctatgtaataaatagaggtatttaagttataacaattataattcccccattacggcagcaattaagttttgcacgtcattagaggcgattttaccattctccagtacttcagcgtgagtcgctttgcctttttctaagggtacaggtgattcgtccaacgcactggcagggctatccaccacgcaagtattggtaatcaaacttaaggccaaaaccctccatccgcaatgtcttgcaacaatgacttcgggaacagtactcattccgacagcatctcctcccaacatccttatcattttggattctgctcttgtttcgaaagtgggtccagatacaaaagtataagtaccttcatgcagtggcctttgaatcttgagctctttccatttcttaaataaaagcttcctcaactccagatcatatgcatcactcaaggctaaaaaacgaggtccatcttcatccaagttaggacctctcaatgggtgctggccagcaaggccagggatatttaaatgatcataaatgcacatcaaatcgcaggcttgatatttcgcgtttataccaccagcggcattagtgacaattaaattacgaacatgacccatgtggttaagcactctaataggaaaagtagtctcaaacaatgtgttgccttcatatccatgaagacgaccattcattaatactactggtgaaccattcatagatccgaacattagtgtaccggaatgacctggaaccgtacttttcttgaatcctgggatgtcttggtatgggactgttaccgggggtggattgtctctagacagcttggtagatattccaccaagccctgaaccacatataatcaaagttctcggaggctcgaaatttgttgtatttttgaaatgtggttctaaaatagcagaaatatacgcagcggccttggtaattgcttcacgttgttgacttacgttcaagatatcactcatcttttaagtttattcggagtttctcatgtgttctagaagattagcaagattatcctaaagttatgcctgccctatctgccctctgcttcgagattttccttttctttgcgctttgtaaacactgaaacaaaaacaaaaacaatggaaacatcagaaagatatttatttattgtggccgcataaagttttaattctttgataattaacgtcgtatttgggaaactgcttactataccggatactaggctgccctgatcaaacaaggaaattgacagatgatgcttgaagggtatacggtacaacctccacagtctactttgataggtgacattgaaattcaggacgaaaatgcaaaccaagaagttaagaacgtactttaccaaggagttcaaaagggtataaaaaggctagaaaaaagacaaaggagggttgcattaggtgatgtaacctctcaaaaggcaaacaaaatacacaatgctatacataataaattccatcagacgaagaacaattttgaaatagagaacatacgctcatcggccttggtaaaagaacaacaacgagacgtaaggcatgaagatagcgactattttttaattgatagttctgaaggctcttctactgatgacgaacaagttaatgaagatgctattgatgatttgttaagtcgaagagtaaatgatcagcagattcaagccgatgaagtgtatgaagatttcgatggagaaatgcaagatgtcattgaagaggatgttgatagtcaaattgaaccactatcaccaataaacaacgatgaaattcagactgagctggacagggcgtttgaaaaatattttcggtcggttcccaatccgctggatgatgatacccatgatgttgtgatggttgtggagtacgcttccgacatattctattacttgagagaacttgaagtgaaatataggcctaatccctactatatgcaaaatcaagtagagcttacatggccgttcagacgaactatgatagattggctagttcaactgcattttagatttcaacttttaccagaaacgctatacctgacgattaatatagtggatagatttctgtcaaagaagaccgttactttgaacaggtttcaattggttggtgtatcggctttatttattgctgccaagtttgaagagattaactgccccactttggatgatctagtttacatgctggaaaatacatacactagagatgacattattagagcggaacagtatatgatagatactctggaatttgaaataggttggccaggacccatgccatttttaagaaggataagtaaagcagatgactatgacttcgaaccaagaacattagcaaagtacttattggaaactacaatagtagaacccaaactagtggctgcggcaccaagctggttagctgctggcgcgtattttctgagcagaacaattcttggttcaaatgattggtctttaaaacatgtattctactctggctatacatccagccaaataattcctttagcatcactgatattggagaattgcaagaacgcatctcgacgccatcattcaatttggaaaaaatactttgaccaaaagcattaccgctgttctcaaattgtagaagaatggattgtttcgacagaagcctaacttactcatcttaacaccatttgcttcagttttggtttcggaaggatcatatttcatttattcaggtagaagatatatatcatattacacacacacacacacacacacatacacatatacacacatatatatatatatagatatatatatgaatgcatccttgattccgtttcagttaacaccccgatggtccacccaagtttatatcatcctctttttgaccgaatctttatttgacaatcttcaagcagcctcagggcaaaattcaattctggagggtttgatatatgtgccctatgcctccaggtaagcggcattcgcagtagaagagcagcaatcacatactccaactaagttaaaagacgatacttcgtatcttgaaaagaaattaccttattcgtctagtttttttgcttatcccttctttgcttcgcactttctactaagctgtcccagcgttctcttaatcgcccaatttcattagccaattttttattttctttcgtaatttcgtcaattttcataccatattctttaaattttttctgctcatataataccaactcctttttgaattgttccagtcttaagttaatcttcatttccgagtttttggaattttttcctccttctgttttcaattgaatatcattattcaaattaaattgtaagcggtttaaaattgacataagaagtggatcgtttatgggacttaaagtgtcctgatatgctgggttatcccaattcctagcattgcttattccatttatcggagatttgttgtttaaaataacagagccaataagcatattgttgttgaccattccaatattattttcttctgatgactgcttttcaatcaaaagttccaattcttggattttggctgtaatgtcctgttttaataggtcaatggcttgcgtaacgtcagaacttaatttattttgagacaaattctcgttctgcggacctaaaacttcaatggcttcttgatacttcgcttttgcatttgtaaaatctccttttcgacattcctgttcggcgtcctcaataatagtataaacctaattcatgttagtcaccatgaacaaaaaaaaagtgggggcataattcaaaaacttacttccgctaaagtactcattccatcaccaagattagtataactgtcgttgaattatcgaactaatccgtgcagcgatacagatgttttttatttcaaacagagcgttccattacgctgagttgaatcatctggtttttctaccctttaggaaattctaaagttgaagaggcgctatcgatgtatgcaatgatgaaaaagtggtacagagctttatacatattacaatacagtgcagaatttataaagggagataatacatttgaagcggttgttggtatagatatattgagagtactataataaaactattgggcggtggtaaaattcctgaacaaggaaggcatcattatactaatttatgatcaccgtcggcatccaggtcctcttccaactcgccaaccatattttcatcatcaacaagtacatcgtccaagtacgaatcttgttctgcagctacataatcctccatcaggctttgtactacttctcttgactcggcgaattcatcttgaacgttctgcattgattggaacaagtcgcctacattataattatttaaaaatgcgcccttggcaaatactttgtcaaaagtattgcacgcattctcaaagacgttcaccacggtagacatattgcttaacatcatgccgctaacttcgttttcatttggttgtaaaggcaagtatggcgatcttcttccaatgttaacgtgcatcgcagaagaggaccatgaggggaatttgatgcgttgttgtaatttggtcatagcacgcgatatctgacgaggttctacattaccaatgattgtattataaacgttaaaatatgttggattgttcatcgcggtagagacaagagaattggaagggtctaataaatctaacatgacgtcataactggaatggcctttatgcgctatatcatcgtgaatataatctgatgtaaatggagtgaaactagggcttaggaaatgaagttcaggagaaggaatcaaggtagagtaaatactggacatggatgaatacatgtaactcggaaaccgtatactgttcgttactgaagatattatggtcgatatcaattgattcgtgtgttgtaaatcgatgttcggatttctaaacactttaccggaaatattcagcaacgaagcgttatcaaacaccaccgttgcatcgctatcttctatcagtcttctcaaagccagaatagtgttataagattgaacaacaacctcagaagatcttgcagggaacacagaatatgtcgtgagtatttttttaggatatcgatcacacagcgcttctaagaggttggatccgagccctgaaccggtccctccggctactgagtgcagcaactggaaaccttcgaaattgtcggtagaatcaatctccttgtcgatcttgttaagaatatcatcctggttacgagttcctatatcatacccattggcccaagaattaccagcgctagcgccatcagaagctacccaggtatttcttgggtcgaaaaacccacgaaatgtgttctccacgtcggcgatgacactaggctcggaatccatcataatagcccttggcgtaaacttattcctactgttttcgcggaagaaaggctttgtgtcatcatctctttccgtactggaatcaggaagctgagatagcccatcggtgcctatagcgtgttctttcgccaattgagaccagagaaacttaccaacgtggttcccgcattgacctgcttgcaaagtaataatttctccacccatagatagttatatgttgaattcttatacatgtgactaaccgatattacgcatttgttcatttcgcagctactgttacgattattatttattacatttaatgaaatttcccaaaagataatattaacgcgttctgttacccggtgatattttctgaatgtcagggtaacaaagagagaacgttataatgggagaatagtaaatatttgctttaggaaattagtaataattgcaatgcggaaaataggtgcattttgtgtttcttgaaaggtttgaactaaagaatgtatacatatatattagagcgtgccttcatgcagggaattagaggatccgttacggaagagagaacttcgtaagacattattgctgtgactattttgaccgtttccaagaactcaaccagtcatttatctttggagtaacaaagcagtcccatttgagagacccctcatcatgatgattcagtctgtcttgcctgttatacgaaacgactactcttgacaaatctttttgggaaaaggttggtgcctttttctttgcctttatacaaaactgcacttgttctgtgaatttattttggtacggcgttacggtgatttgttcaacatgcgccgtaaattggcccttttcgataatatcgggtgaattttcccaatctatgaggccacctgcccagtttattgtaccgggtccgttggtttccgagccgcctggccaaacagcgatttctagtctcatcggcgtttgtgggtacctatattctttactaatggggtcccaggtatccttcttcaggactgtgcgagctattttaccatcaacataccatattatcctatccgggtcccaatcaatctcataagtgtggtaagtggcccaagtgtcagcgcctacgggaaatctttgcattcttgtgtaatccaaatgcccttgagaatagtagtttgattgggccgtcattaaatcaccacccagccactcaaaatcaatctcgtccccaattgcggatgttaagtcaaatgcagtcaccacacccctcgacctcgccgttttcattcgcacgcttgccttgccgtatagaaacgacctggtcgatgtgatcaaacttccggtagttttttttggcatagccagaacaatattcccgctactcgcttcaattgatgtgtagccgctatgtgtgaaatcgaaatcttccaacattttctctgcctctttactgtctggagtgaccaagaatttggcgtagtgtatgattctcttggaatttagctccccttctactacacccaccttggtatttgccttattcggtccatttccctctcttattggtggcttaggttgatagttcacaataaatttaggaacctttggtgtgctaacaaattcaagtttttgactggcgactaatgcaggtataggagcacagctttcctcgtcgaaagatgacctcacgttgcagccaccgacacatatcggtccagcgccacattcattatacggcgagcagcacggccattctgcgggacaagggttatttggagaacaagaaatggagtttttgggtttgtataattctcccagtgcaaatccgatgtagccaacaaccggcaccagctgtaatattgatattctcatatttttatttcgtgcaaaagcccttgatgatactctaaactaaacgactgttcttgtatttcgttattaatcgataattattagctggtattgtcttttttttttttttcctacatgatcgtcgcgaggctttacataatttttgtgacgcctttaaaagtatagtagaacgagcacataagaagtaaatgaaaagtacggcagatgcaattgacagtaaagagcggtacaatagttgaagaatacccgataaaaatgtatttaggttgcttgacgggtttgcagcaattgccaagaacactaactgtggcaatcttggtgagaatctactcccaacccaaacattttcgccgatatttttgctcaccttttttttttgctcatcgaaaattgttatagcggctcgactttgatttactaatacacccaatttctaatatcctcaaggctagatcgttctctcaaggaacttaaagtgcctgatcttgcgatgattaatctacagcgatggatacttaaatcatgtaaaaatctcagttttgaagtcgtttgctctcttccatgcttcagttcccttttggaaggtaatataatcatctaatttctcgcatattcacgccgacggaagaacgagccggatcaatatggttagaacccgtgtattattctgcttatttatatctttttttgctacggttcaatcgagtgctacacttattagcacttcatgtatttcccaagctgcgctataccaatttggatgttctagtaaatctaaaagttgctactgtaaaaacatcaattggctgggttcagtgacagcatgtgcctatgagaattccaaatctaacaaaacactagacagcgccttaatgaagttagcatcccaatgttcaagcatcaaagtttatactttagaggacatgaagaatatttatttaaatgcgtcaaattatttgagagcacctgagaaaagtgataaaaaaaccgtggttagtcaaccgctcatggcgaacgagacagcgtatcattattattatgaggaaaattatggtatccatcttaacctaatgcgctctcaatggtgcgcttggggtctcgtcttcttctgggtggctgtgcttactgcagccactatcttgaacattctgaaaagggtgtttggtaagaacatcatggcaaactccgtcaaaaaatcacttatttatccttctgtttacaaagattataatgaacgaactttttatttatggaagcgtctaccatttaattttacaactcgaggcaagggtctcgtcgtattaatttttgttattttgactatattatctctcagttttggtcataatattaaacttccacacccatatgataggcccagatggagaagaagtatggcctttgtgagtcgtagagcagacttgatggccattgcacttttcccagtagtctatctattcggaataagaaataatcccttcatccctataacagggctttccttttctacatttaatttctatcataaatggtctgcctacgtttgtttcatgttggccgttgtacactcaattgtcatgaccgcctcgggagtgaaaagaggtgtgtttcaaagtctggttaggaaattttactttaggtggggtatagtggcaacgatattaatgtctattattattttccaaagtgaaaaagtatttagaaatagagggtatgagatattccttcttattcataaagcgatgaatattatgttcattattgccatgtactaccattgtcacaccctgggctggatgggttggatttggtcaatggctggtattttatgctttgatagattctgcaggattgttagaataatcatgaatggtggcttgaaaactgctactttgagtaccactgatgattctaatgttattaaaatttcagtaaaaaaaccaaagtttttcaagtaccaagtaggagctttcgcatacatgtatttcttatcaccaaaaagtgcatggttctatagtttccaatcacatccatttacagtattatcggaacgacaccgtgatccaaacaatccagatcaattgacgatgtacgtaaaggcaaataaaggtatcactcgagttttgttatcgaaagttctaagtgctccaaatcatactgttgattgtaaaatattccttgaaggcccatatggtgtaacggttccacatatcgctaagctaaaaagaaatctggtaggtgtagccgctggtttgggtgttgcggctatttatccgcactttgtcgaatgtttacggttaccatctactgatcaacttcagcataaattttactggattgttaatgacctatcccatttgaaatggtttgaaaatgaattgcaatggttaaaggagaaaagttgtgaagtctcagtcatatatactggttccagtgttgaggacacaaattcagatgagagtacaaaaggttttgatgataaagaagaaagcgaaatcactgttgaatgtctcaataaaagacctgatttgaaagaactagtgcgctcggaaataaaactctcagaactagagaataataatattaccttttattcctgcgggccagcaacgtttaacgacgattttagaaatgcagtggtccaaggtatagactcttccttgaagattgacgttgaactagaagaagaaagttttacatggtaaggccccttgttaataattcttgcacgcatacttttgttattttgttgctttatcggataaaagttaatataaatcgatgtaaataattttatataatcatacaacagggtaataaaaagacgaatatattcaaatgcgggttctaaatctaagtttcattctcactatcactgctttcttcctttgcctgttgagagagtagttctttccatttttgagtgagctctcggattgcttcaggatttaaactagcttctacgagatcctgtggaacatgattttcggagtgctcttttgaagcgaatctccccgtgttatgcctcgtcactaaccttaattcataatcttcaacatcattcttcggaggtgctatcgcagcaatctcgttccatgaaaatagcaaagaatctgtcttcctggcaaacggatttatatcaacaatgaagattttattgaaaggtcttggaatataaacgtcaagaacgaaacttttatcaggaaacttgggcaggacgacatcatgaactatttcatcaataaggtccttgaaggtatctgacaactcatctaaatagtcataataatttaaatcacgctgggtggccccaacgatatgcgcattcttaacgaagaccctaaattcgagtgccggattcatatcacaccattgtctaagtaccaagtcaaatttcaatccttttatatcatccccgtccacgcagcctttaaatgctctttgaaggtcatgcattatgtaattggatgcgttcaacaataggtaaagctcatttacctcgttacacttcatagtgttattcggcaaaatccaggtagcgtctcttggtgcagaccagtttaacttgggagccactgcacctaattcgttcaaagcatcctttaatttctggtgtaattctggaaaatctatcaatggctcaacttcttggacaaattcggtggcggtatcctcatcgtcctcccaatcactatagtcattatcttcatttcttattatttcctcggtgtacacagacctggagttttcctcttggggtagcttgataccgtcttgttccaaatattgaataaattttttcggtaaggattttaacactatggattttggcacatatttgggatacagtgaggaccaaaacgagtaagaacagtgttcaacctgcgctcttgtcactggtatatctataaaagttgtatattcttgtgaggacatcaataagtaatttatgtcagcgctttttggacgcacgttttagtttcactggtggagttacggtatcattagcttcttaatcttcccactgcataaatggacatcggaaaatatccgcttattatgcctgaaaaaataatttttttaacagagttttctacgtactttttacttaactactgaggcagcgcaactgtttagtatttaaacatataagcatatatataatgcaagtaatcaggagaacatcttcgaaagagactttttagctttttcgttttgttgctttctttttaatttagtattatgaatagctttcaaaatggcagcgtcatttggctggaaagtagtggccatttctaggtcattgagagccatatctgtgtcattaacatggtaataggccaggccacgacggtacaaagctttggccttggctttttcgtcagccgcttcggcatataacacctccgatgaggctactaatacttgcttgtaatcttttaatttaagagcacagatggcaatattcaatggaatagacactttcaattgattgattttttcaatttgttccttctccaaatcttctgggaaatactctttcaagaatttatcacatttgacatatttttctaaagccacggaatagttctgtttcttgaactgttcagtaccaatgttctttaccgtttcgatagctttcaagacggtgtcgaaattcttcaagtcaactttttcgtcttgttttaaaacatcttcataattatcgccgtactcatctgttggtgtagcttcggcattctctggcacttgataatcgtcaggtaacacgccacagtcatcaatctttacatcacgcaatggcttgttgttttcttggtcacattgttggttttcaatcaaacgaacaattcttttaccttgaatcacttcaccaaacacaacgtgcttcccgtccaaatgaggtgtaggaacacaggttatgaaagcttgagatccattggtatttggaccggcgttggccatggatagaaggaatggtttatcatgtttaacagtgaaattttcatcctcgaatttttcatcgtatatgctctcaccgccagtaccattaaaattggtaaaatcaccaaattgacacatgaagtctttgatcactctgtggaaaatggaacccttgtacgacaatggtacatcaggtttagtctttgccataccagcatttccttcacacaacttcaaaaaattttcagccgttttaggcactatgtcattgtacaactcaaaaactatacggccttggggtttacctccaatagaaatatcaaaaaaagttttaggtctagtcatttttactccttgatcgcctgaatattgtcttaccagttttctatgtgatgtgagcgcatcagcacctctgatattcgacttatttaaataattttctgtctgaactttctccagctagggcggaaaaatattctagaagctcatagaaatgccgttcaaaagcgtaacagttatgttctataaagggaaacaatgtgtttcgatcactgcagctgtctattatatacaagttatacatcacgacatttagattttcatttcttcttttccgaatccttactggtcgtcccatccacgtccactgtgcttacgcgctctctattaccattcttttcccaacacttcctaaataacgccatctcgttgaagcactgcctccagtcacctgtttcggcatggcacagctgtaatgcgaggttctctacgtagcatccggtcttggatattctcgtgtcccacacatccgggtcttcgtcttcttggacctctttgtattcttccagcgcctgcttataatactctgaagtttcgccagtttcactcatgaccagtctgccagttttagcctgccagagcttttctttccctttaatcttcccttgtttggcgcaactcttagaagtgcctttcactacctttaatggctgaggcccctttttttgtttcggacatttgttgtgagaaaaaaaagaagaaaataaaagcataaatgaagcgaatggatgagaagaggggagggaaagcaagaacgagaaggacaaacatcagggacccatacttcaataaattgcttgatttggtgttaatcaattcttctaacatcaaacctcttttagtttccttcgatcgtttcacgttgcttatattgattgctttttacttctattttttcactagaataaacaaacaaagacattctgttgatcaagaaagttgaaaatggtatttggttttacaaagagggacaggagggtacctgatttatctaggtatgattactactatcagaaccatgaagattataacaaaagtcctcagctctctgctgctgctgcctctgctgcttctgccgcatcaccggatcgaaccaattactcaaggtcgcactcgctggttagtcatgcaccttcaataccgagacaaagaagttcggtaaagagcccaggaagaaggctttccacatcctctgccgctccgccaacgtccagggcagcagctaagcagtattcacagaagacttactcgttgaggtcgcaaaggagcggagagtaccatttacacccgcccggttatactactaatgggagccgtatgaattctatgacgtctggtgcgaatgtcagaagaaactacggtaagaacaaatcgacggccggcaacaataacgattcaagggccaactccattaccgtaaagactacacaagtaacagacccttcaggaaggactcaatcaattaccaaaaagacaataagaaaaataaatgggtatgaatacgtagaaaccacgactacgactaagaatttggttccattaggtgactcgcagcgtcatttcgatgaatttagtgaaaattacatgttgcaagatgacgacattttagaggaacaagctagtgataacattcacgatataatcgaggaaaacgaaacagataacgaaaagccatattccccagtaagcgaaagtcatttacaagatgattcagagctaaacgtggaaaaaccagatttcccacttggatcatatttccaccataagtattctacagacgttatgcctctagaagaagaaagtagtttatcaaacttcagtgacgcattagattatattcctcccacccatcagaccagtagtaaatatattcataataaaaggaagcaagcatcgacgacaagaaggaagaaaagaccgcctgccgtgaaaaacgcagaagcagaggccaagaaaccattaaccgaagcagaaatgtatctgaaggcactagaggttgctaaaagaaacgtttatcacacggatgctgcttcggataacgcatcggcccccctcgggagtaacaaatccaggaaaagtaggatgggtcaaaaaatgaccttgagaagcagtagtgattctccgacggcgactgctaatcttgtcaaatctaatgtcgaggttcaaccaaaaagatttacaagttccttcttcagcagaaatactaaaagcgccccccatgaagtgcacaatcactctgtgtctacacattttaaatcgaataaggctgttgacccagttccagagcctaaaagtgcaaacacagggctaacagataaagaaatgtatgaccaagctttgaaaatcgcacaagcgaggtattacaactcacatggtattcaacctgaagcagtcgataatagcactacggcggctaaacctcgtcaggtcggcgttagccatctgggatccactgggagcatcccgcccaatgagcagcactatttaggggattctgaaattccagtccaaagcgaagtgcatgaatacgagcccattccattgcagaagacaaaaacaactggttcttccaaaaataagttcaaaaccatgttcgataaagtgctgcaattctctcaagaaaactacggctaccagcacaagaaggaacaaggcgaacaaactccagttactcgtaatgctgaagaaagcttcccagcagcgtctatttcggaaggtgtgacaaccgcaaagccatcttcaaacgaaggtgtgatgacgaatccagtagttacagattcaccttcaccccttcaacaacaaatagactcgactactgcgtcctcgaatgggcaaagtcagggcaatgtacctacctccgcagtagcttcaacaacgagaacaagatcaccggaactgcaggataatctaaagtcttcttcttcgcttttacaggaccaaacccctcagcgtcaggaagacgccacggatccaacaacatcatcgacgaatgaattatctgccgctgagccaacaatggtcacttcgacacatgccactaagacaatacaggctcaaacacaagatcctcccacgaagcacaagaagtccagtttcttcactaaactgttcaagaaaaaaagcagccgttagcagttgtttactcgaattttgcaatcaaccctaatttttgaagcctggttttagatttattctcttctttttcttcttgtgaacttcaattactaatgtaacttaatttttaatataacttttacagtttaataatattgatttttttcggtctggaccaatcgcgccgcatttctcactaatattactaacataccctcttctcattggctcggtacccctttcgtgacccgcattttttgttttctttgttagcccgaatgtctcacaatgaagatgtaaaattaagattatatatgaaaaattgatacaaaacaaaatagttcaaataatcaagttaaagcgacatcactctcaatttttgctttttttaggtttatagaatagaaatataacagaacgaagcctttagactctttttttttattggtatattgaacaaagaaactttttttttgtcctcccatatctcgtgcacacaaatattatgtccattgtagcactaaagaacgcagtggtgacccttatacagaaagcgaaaggtagtggtggaacctcagagttgggggggtctgaatcaactcccttgttgaggggtagtaatagcaatagttcaaggcatgataacttatcctcatctagctcggatattatctatggtagaaattcagcgcaggatctagaaaactcaccgatgtcagtagggaaagataataggaatggcgataacggttcggataacgaaaaggcgaacctagggttcttccaatcagtagatcctcgcgtaattagcgatttgattatcgggctaagcgacggtttaaccgtcccctttgctctaacagctggtctatcttcacttggtgatgcgaaattggtcattaccggtggctttgctgagttgatctcaggtgcgatttctatgggccttggtggctatttgggagcgaagagtgaatctgattattatcatgctgaagtaaagaaggagaaaaggaaattttacgataactccaacctaattaacagagaaattgaagacattctgttagagattaaccctaatttctcggacgaaacaatcgtttcgttcatcaaagatttacaaagaacacctgagctaatggttgacttcattatcaggtacggtaggggtctagacgaacctgccgagaatagagaactaatcagtgcagtcactatcggtggcggttatctacttggtgggctagtaccactagtgccatatttttttgtctcagatgtgggcacaggtctcatttattctataatagtcatggttgtaacattattctggtttggttacgtaaagacaaaactatccatgggtagtggcagttcgacttcaaagaaagttacggaaggtgttgaaatggttgttgtgggtggtgtagcagcaggtgcggcttggttctttgttaagttactgggttaagtgtaaagtaacaacactatacatatttattgtaaagaaatttgggattgagaagctttgctatatacttggaactgggctggattttctcgacatacatttcttttacgttttaatttgtttctatattctcctctttaaatttatttatattaatgaatttcaaactagtttctttttctattgccaagaggcccatcaggtgatccatgataacctttattcgcattgaatcgtttttcattggatctaattcgtcatttggtcgccgcctttctttgctccttctgcttttttctttttctctttgactatcaggtcataagatcttctcctccattatgcccaagtgtttttcttttttttgcctttatataaattacaaaatacatacatatacttctcgtgcagtatactggaatcagctttataccatatgaagcacaacttggatcaggaccgctcttcattaaaaatcgaagaattatctaaataattaatgtgcacgtcaatatattctccgcggaaacatgacaaacttttagaaaaagatttaaagcaatatttttcagttctccatttctttatttttcaagaccaattctagttcaccaatatcaaacattcctatgccttcctgcagagcatctgccaaaatggatagtgatttattcgtgaaatccggggcagctctaagacgattgatatcatcaccgtagttttcaaaaagtaaatttaagtattcttcccttaactttgtcttgtctttccctttgggcacaaagttttctgccaattcattgtattcttctctcgcaagcttgatattttcggcaattttcgatgcattcataaaaccctccttgttttgagatttcgtaggctctgggatcttgctcaaagaaattttggttaaatcgtctatcacttcttttgaatttaacttcaaatccttgctttcttcgtctgtaagctcgacatccgaaacttctattgcaatgtcctcttgtttgtcttcgtcattaccttttgagaaaacatgatcacttttaccattttctccaacgtgttcttcgatggccccattttggatttcctccttttcactttctgatgatggatccgatgatgaagaatctgatgatgaaacatcagctgttcttctcttcttcctccttctgttttttttgacagacttgatatttatggctgatatatcacctgccgacatcctgtataatatattatggctagttctttccgtgctatttcaagtgggcagtttaaattcttgtatatattactacaatatatgaaagttttcgctcttcgttttttgcaaatttttagtgatgagctcttcgcgcaaagaagttttcaatgcccgtaaaggcacctaattatatatcgaattattttaagctttccgcttcatcaatgcattttgtctttatatatctagtttacaaaataatatgttgctattgccttgcttttaaaggctcaatatcttggacttactgcctagaatagcttatccatttccactagcgcgtagtctaatatgtaactttgttcaactaagttatcaacccttgtgaaatgcctttgcgtgtatggaattattgcatcaactatctttaccattccgggtatctcactcaattttgctatgttatgatgcatcaaaatacatcttattgttctttgcgctatggtatgtgtttttgcatttgtattccaatctctgcatcgtttcattaacaaaattaactgttcatcatttaggatagagatggcttggtccaattcttcattgaaaatgacttcaattttgccctcttcggtatcttgtctagaccttgattcgcccaaagctcttttcaaaacattaaacaacctcattgggtgatctaaagtcattgctaacaaaaatgcatttgtccaatcacctttgctcatataattttgaagcgattgttcttgttcgacttgtaatttagctttttcttgttcttcttctatttcttgttccgtacaatctttccaaaactgaaaaacaccatctgcatcagcacttacgatcatatcaccatcattcatagtacttaaagcccataatctattattatgaccatccaaagtcttcagacattcaccgctagaacaatcccatattttgatcaagccatcagcaccacaactgatcagttgtttttgcttattaataaacgaacatctttgaaccgcattggtatgaccttccaatgttttcataacgctgaatgtatccaatgaccatatcttgactgttttatcacctgaagaagttgccaataatttatcatattggcaaaatgatacatcccatagtccacgcttgtggttggccaacgtggcttccaattcaccattttctaggttccagatcttacaggtcttgtcgtatgatgctgttgcaaaaatagaatcgttaggagaaactgacaaagcattgatatccttttcatgggcatgacgagtatattcggataccttgatgatttgaacatccatactagcagttggctttggaattatccatttcttaattgttaaatcattcgatgctgtcaataaaaattcaggatatccctttgaaactatatttggcaatccaacagcagttacggcagctgaatgaccaatatacttggcataaatatcaaacttgcagctgttctcattgtatctccaaacaatagccgtattatctttagaggcggttgcgatccacaggccatcctcagtagcatccaatgaatttagcaaatcttcatgaccttcataaatttcgacatccaaaggcagcgaagcttctgggcctgataaatcggggacgggtattatcctaagcgatggagaattggtagctaaagctaatttattcagctctgggccaacatacctcatgtcagcaataataccatgattaccagcaatgctcgaagtgacctgtattgtgtcttcatcattctttaagtcttcttcaacgttaattagttgtaatgtctggtcagacaatactaaaaacatctgtgaattgctcaatattggaagtacaccaataatgaataactcttctataggtttattggttcttttaagcacgctaccagattcagagtcaattaactgaaagatagcatcaccgccggctgtataaattatgcgtttaccgtcaccatcctttaggaatccgcatgactctacctgttgatttactggaagtgttttcaacaatttacatttctttttcatattgaaatcccagagattgatgatatcgtctctaccaccggaaagtaaatttaggcttggctcatcattatctggtacctcaatgatatccaaccctctcacagcagatgtgtgctcttgtaatgtgtgcaagcacttccttttaacaagatcccaaacctttaccataccattggtgtcaccggatgctaataaccatattttactattcaattgtccataaaacttcaaactggaaattgtaccaccatgacctttgaacgaatgagtaatgtaaccattttcaatatccacaacaattatactaccatctgtccctccgactgcgagaagcgttgaagtggaatctgcgtcgagaatgtacgatggagaagagattttcattgatctgacaactttcccggtcttaaggtgaaagatttttaaaagctgagcttgtgaaacatacgtgagatattgaccatcaggagttaatttcagtgcagtaatttcttgctcgtcttcattagaaatcttgtgcaaaatttttctggagcctggggttaaatcgattatgttgatttcgtcaagcaccggagtagctagtattttaccattttctgaaacagtggcaacagcactgcttcctgcataaatagggtttaacgatatacctttatatgaggttttcagatccatattgtacgtagtatggcttactaccgttgagagtactatgttgttggttcacacctttaatgccataccgctattatatctgagagcgatgagctgaatttttcagaaaattttcagtcgctttacacggatatattaagaagctccatcttaatcgccagaagagtggatgaggttatcatctcaactagagtcgaagagtaaggcaatccatcaaatggggttgcttgaggcttatttacttttatacgtctgattggacggattataccagtaaaaaaaatattgattgtgtttttctataaaaatatgcatatataagtaaaaaaataacatgtaattcttttcaaccaacgataaagcaaaattcagagtagaataaggcaaagtcacatactgatgatgatattgtaaacgaaaggtgatttgattgtagtaaccataaaaaaatgcaaaatagctcattgtaagacgtcattgaattcgaatgaatggttaacatcattgcccataattccttcgatatctgccaatgcactctcactaaataaaccatttttagtgaaacgaagattttcagccgctgcttccaccatactttgccttcttctccacatggaattactattttcatggcttaatgtattgtcgaattgcacaggagcggttaacgatgctaggatatcggcgtcagtatcttcgatcacatgaccttcttgtgcatcataaccgttaatatcacctacagacagtaagtcattttcatctttgcccaaaatctcatgaatttcatctaaaccaacactttttgttgaatttttccttgtattgctgtccacggcaagatcagaattatgaggtattaatgacgcatcttcaggtgcgtgagagggaagttcattcataggggtattttcattggttgtaaaatcggtaccggtatttatgtcgctatggctgttattgttaccgatgatctcatggccattgattcccaattgtaaattcatagtttcttgctcctttattgccttttgtctttgctttcttattttaagaagcttcttttttttctttaactgcctttttttttcagtttttttccgttgtagctctttcatcttatcaatcttctttcttgttctttcattaccaatatagccaatgggaacttttctgttagaatttgctggtatcatgtactcatcttcttcataggcattaatacccttatttctaaatgcagataatggaaccttaggaacttcataccaatctgcagcatggccatttgtgcttttgctattaattgcatcattgtaattgttctccatatcgtctgtgtgggatggtgaatcatcctccaattcactcatgtttagcagctcattgagtgtcaattcgtcaccgttattgccattagagcttccctctcttttaacatctggggtttgagccctttgatgttgctcgcgaagctgttgatgttcttggattaaggcgtataatgatttagtagacagaccatcaataatactaaaaggtttgttgtccgtctcccaagtacccaattttggtggacgtaatccaacaacatttgaacttacgatttcctttgcttttgagccaatgttttttgaccttgaacttgggggcggtaggttatcatcttcatctgtggattcgtcatcaacgtacacaacagtctctaagagatcatgtttgcaatctttggatccatcagaattttctttgtctgagttagaacttatcaaagaggaagatccatcgctgtcgtaatgaaagtaaaaagagtctggatctaaatcatcgatgtctatgaacacatttgtcacgctggaatcatcgtcgtcgtcttcgtaatcgtcgtccagttctgtgccaatgtctaagctatctgaatctagtgccctcaattcttcatccgtgtcagcatcgtgggacgtttcagattcactgcattcatcatctgaaggcatatgggcaacatccaacaaaatgttatcatattcatcgtcagaagaatcatatttcccggaattcaggaccgtactatgagtggatggttccagatcatcattggattttatcaaattcgagcctttattcttatgttcaatatgacttttgcccgatttatgcctgcctttcttgctcttatggccactattttcatcatctgattgaaaaaaaacattgaaaatatactcatcattgtccacattggaggttgttctcgtactaggtttttgcgtctttttatagagctttcgtctttgtttcctttcttcctgttcccgttttttggcctctttcttttttagtttagatagtttttcatcatttagcattaacggtaaagatgtactcaaggatagctttggctctgaaccatcgccataataataaagatttgcaaatttaggatcttcataaaacggcatatcaaaatcagacattatttcatcttcttcgtcatcttcttcatcatatccgttttcttgattgtattcattttgcaaaaatttattttcagcatcttctacaggatcagacccttcttcgtgtatactaccatcgaatgagagttcgtcgtcattttgtagctcagaaacaatgttttgttcttcttcttccaatatgggaagatcgtcttcccccgtttcaagatctgtaccaatttctccatgagaatcttcattgttaatcacgtcaaagtacgcatcctggtcaatatcatattcagattcatctgactctgaaatattgggaaatcgtaactcatcgttgttacctaacatcaccttagaatccagtttatcttcttcattaccattgttctctttgttttttaaatccaagacttcttcacctatatcctcgttatagccttcattaccattaccaaaactaatgccgtcgtcctcttttttgaatttaaacgatagcgcctgttgtgtagtagtagtgcctgaaccgtttacttcttttttgtttgattcttgttgtttttgttgctcttctttctctttttctttttcttctttctgctcttcttcattttctttcttaggggatagtttaactgatttatttttgttactgttctcacgagaggaatagagtgtattgctatttgtattcatggcagataaagctttcatggctcttttctttctttgggccgtcagtttgacaaaatctatattctcgtcatcagaacttgtttcgctatcactatcactatcacttccgtcatcatcatcgtcgtcgtcgtcttcgtcatcatcttcttcttcttcttcactctcttcttcttcattttcactctcttcgccatctgttacagcttggtaatcggatgactctgtgccctcgtcgtcattgtctatttgcctttgtataagtttacttttttttccttgggaattatttgaaatgttctttgcttttcttttaattttatgtgggtttgtacttttgtttttatcagaatcagatacgtcactcaaggatgactcagaagagtatataaggctaaatcttcttggcctcgttgtactcagtgtgggtggtgattgcctggactttgtatcggattcgcccttttttatgagccttttaatatttgctggcagtttaccagaatgtgtactatgattgatcgtactttttcgaggactttttttgcctgccatttcgttctgtttccagtttgccggttgttttttccttatttgtttatttgcttccttgttgaatttccttcaatttcaacaagcttgaaaatgaatttcgtagaatgaatattactatgtttgaaatggttattgcttatgatgctcaccgaagttaaaaaaaatattataggtttgtcctatgttagaattgtggaaagggaggaatgtaataaataagcagtaattaaatatagccttttgaagagttcctccttttaatttcttgtagcaagtgtttcgaatgtattcaaatattaccaatgattatacaaatacttacagcaagtcaattaaagagccgtaaaagctaaacgtcaaaacgtgtaaagcacctattatctagtctcttttccctagttgtactttaaatcaatttagtgatgagatgaaaaaaaaaaaaaaaaaaaaaagaattccaacgaaaaagaaacgacgggcagggcaacctttagagatttcaatccgtataaagagatgtagtaggcagtacgggtaacatcgtcacaattcataatggaactatctagcttttgcttgattgcaaagttctacacccgttgatacttcaaacatctttgcaatacgtaggtaggggtcgcgtactagcagcctcctagttaagtgtatctttcaatcgcattacggaacaactaggcatcccgaaccccacacggaaaaatcggaacaataactgaaaatttcctttttcttttttttgctcttcaaagtctctgcccctctattgcgtactcgattgatttttttatcaaaggccatctcagacaagtagatctacattggagtttctcataatattatcactatcggaaggtagcataacctttaatagagtttccgctgtttgcttggctcgtttttttgtttgtactatgcctattggcgcaaagaagacagagtgtgcaaacaagagatgaatcagagcgatagcagcttgatggatttaccactggagatacatttatcattactagagtacgtgcctaatgaacttcgtgctgtcaataaatacttctacgttttgcataaccacagctataaggagaagagtttggcgtggatagctgaggacaactatatatgggccgttgtcaaacattcattatgtttatatgtcaagagtttggacccacttcgacagcatgccagagaaatcattcaagaaacgaaggaaccaggttttaatgtgccactgtgcatgactaaatacatcgcagattcttggtatattgtatacaatgcgctgcaatatcctggaaagataattaatatgggatgggacaaatataccaaaagtcaagattcaaatggttctgattctaccagtaactttaatagtcggcccaaggaaagaactcttatgcagtcgttgacagctttacctgttaacttttggtccaggaggaaggacgagcctacaccggtaaacgtttggttttatgtaaaaaatgcgcacgttgccagatacataccgaaaattattacggaaataggcatatgcaactatgggccgaagcagatcgtggcaagtgcaggatatatcaacgaattgataacatctgaaggaatatactgtgttaacctaggccaccttcccaggctatacgatgagcaaatttttgaaggcactggaacgacacatcttcccctggaactgaaagctatcgacaggacagattcagatgtttgtatcaatggtgatttagttctactcggttatgactttattccatatcagatatcgaagccgtggttactctttagaatcgaacccgtaaatagcattgaagcaatcttcaactatagtgaatgttctttttcataccagtttgcatggagtttggcctgcttacaatctgaagagaaaatttcatttcctagagacacgataattgggcacggtttaccttacaagccatccaaattgataagaattttcgtctacaagcatccggaacaaaagcaagatcttggtcaagaaatagcattgcccaactggaataccccttatcttcgaagatgaaaaaaaaatttatcaattagtctataatatatgtgtatatacgtctatgcacctacctacttataaatggatataatattcttgcaatgatgaaaatatgtatagtcaaatttcatttttttcaattgataaatgtactttcaatgatggaaactccttcatcgtcatcgaatttagacttctggcagaattggtaaatgaatggcttcatgtttgccagattttcagcaatagacctaatgaaagcgggcagctcactcattatatcgtacctattgactaatcttaaattagattcttcaaaaccacgcggaaatgaaatggatgtaggatatttccaaccattttgcttatcctcttttgtagatggaaatttaacagcatgatcatttacacttgacccgacctccaaaattttgtccttatcactaaccgcccatatagtcactgtagtgctgccatattcttttgttgtggtgaattcaatacacatcatcgaacgcttctcaccattgaaacaaagaaaattccatttactagccgccttattgggtattagcccctggacagcatccagatacaacataggcgtgtccttcaagtccagcttcacaggtttatcgtttttcttgtatgagatggtaccattgcaaaaacctctaggaacaaaaacatgtcttatcatttttctggacgtactagaagagtctctttttgctaactcttccaagctgatgctcttgtcaaggtaataattggaaccgtccgggtttattatgaatccttcttgtaaatttacggtaatgtcaaccttcaaatcttttagtaaacagcttgtacttcccttcggaatatctatcttaattaataattgagcaaatccactggaggaagaattttccaaaggtacgaagtgaaacgtaacattgtccgattcaacttttaacgtatcaaaatctttgatattatcaattttaaagctttcccatatatcaatgtcttcttcagagttttcctcactgctggctttaaatattttgaaatttaactgaaaacctttgtatataccgcccataacactggaatataatagttgaattaatccacatttgccgttggtgagatccgtaaaatacagagtttgtgtctctattcttgtttccgttggatttcttactgcttttaataaactatgtgacttgaactttttgtgatttgacgtcctgcaaaaccattctagtttcgatgtatcctgaaatttagtataattagcatgatccttctcggataaaacttccttaacgggggcaaatttcgtcttctcctttttgatcgcaaccgccattttttctttgctctatgatttttatgttaattaaactgttcgttgccctaaaattttgaaaatttctcgaatatttagagagaatccgtcactattttagtatctatcttgtctatttatatataaaatctcattcccctgttatggtttttgccaagccctatcccaaaaaaccaaatgatacatgataaacctatttatcctctttaacagacctatcgtttaaagcttttttattgcaaaccctattcattatggctttttgacctaggtctcattgtgacttctatttttcactgttcagtaaaaaaagaaaagtgattaaaaagtatcactatttctgttagaaagcaagtagctattttgattggtaattatatacacatattgaaggaggccgtagtattttcgtttaaaatatattacagtaagataatgtctgctacatcttcaagtggtgacgtgaaaaaatttcaagctgtaccaaaaccaacgagcaatgcatcaccaccaccagcatcgagtgggtttaacgcaaggaccctatggccggatttgatagaaacaccagaaaaccagtgggtttttgagtgcaaagatattattgaaaagataggcactaatggaccgatagcagtggaaataaaaaaaaatatggaaaaatgcttaatgtacttttacacacttaaaaaaaaattaaatctttttgatcacacctatacggcatcatgcattctattttacaggtattggttcatatatggaatacctacagccataactgaatgtattcatatatcacagggaattctggtcaccgcttgcaaaacaatggagaataataggcctatagaggcctatattaaggcgacttgtgagtttttgatgcaaaatataccgtctttaaaaagtcgaacaaatattgataaacttaaatgggaatttagagataagttagtgacgaatgaaaaaaaaatactatgtttatttggctttgacttaaatatcagtaatccaaaagaattgattgaagaagtgttcagtggctattatagattcaacagggatcacaatctgccagaaaactttaaaaaagcttttccaaaaattcttcaagaatcaagaaattttatggtccaagctgtcacccagccagtttctttattgtgcgacggttatacgttcattgtactatctctcatatactgtggtttagagtataaaaagcttgtagacaaagatttcagatatccgaaaaacttcttcaaggatagattccctatcgaagtaacgccggaaaattttgccaatatctttaccgattacaagttactggaagagaattttttcaacttaaaaagtaataaaggtgctaaattacaaattgattcaagcatgattgattcggtgattgacgaaagtggcgatgtggaaaatgaagtttcagaaatctctgatccgtttaactacgagttgattaaatccggtgaggtgaaggaagagtttttgaatcatattgaaacaagggttaaagatttactagataaggctaaacaagaaagtatgaagagaaaggctaaagatcctataagaaccccagatgccaaaaaacctaaaatataaaaatagagtacaagttatgtttaattggagggatcagtaaaggtttgatatatacgtgacaaaatgtccggcaagttccctatgttatcctgatagcaatatttccaatactcaatccaatgatcatctgtttctggatctttaggtgagtcaaagcgcagtttctgcttcaattttgttttcatcttgtctattattattctgggatgtctgaattggtaagttcggggatgataatcgtccagagattctgaacagtcattatcttcggatattttttcagcaacaagtaatttcccctccatagcagtcaacagtaccttaggtagttggtagtcagttacttcatcaggattgtcacaagcatcaataatattttcgatgatacataagcattctatggtcaatttatccatttcagatgatgcttcgaatgtgtattcattatcttgcatatagtatagttttaatacataaaaaaactggataactttaaattgaacacctgatgaaagtaataagccttccagaattttattcaagcagcatataatctgagggtcatttttaagtttgaaagttattgacagaatatttttttgaattgtttcattcatgtggttactatctactaatagtccgattctgggaccgaacacatcacattcacactcccaaatttttcctctcagaatggctaacatttcttcgatttctgcacaatactgaaaaaactgactaaaaacaaaattttcattgacctttgaaaatttaagcgttatcttatccatcgcatcgaaagcgacgcagtataacgcctcaataacatctacctcgtcgagtgaccagtgccattgaagtgacttggtctcctcatttaaatcgaagccatgggaataattagggttttgtcttttgataaaattttttagattattgcctaccaatgcttcattttctttcaaatcaattagaaaacagtggcaacacaacatggatataaatagttcgcaaagttcataaaaagctccaatttgctcgtctgcgatacttgcaaatagtcttgtcctttttgagtacgcaatgaattgtaagcaccagcgaaaagattgaaatgcgaggttataatttttatctacatgaccaaatactccttgaaataattttatatatagtaccagttttaatttattcattgtctctggatcggctttatctttcttcattatcttgatgatatgttttggacccatcgcaagattaaagtttaaaattttggccagcgcttctttcagaaggttattggtttgaatccttaatggtgaaccttttttcatgatcgaaagattataaaaaactacatggtacggaatataaagagccaaaaagtcccttatcaaatcaccattatatgcttgtaaatttaggatagtcttcacagcttttttaaattcttttcttaaactttttttaaaagtttgatagtcgacgtctttattcattatacgtgagccgacaatttgtgactatgatcaataaatagggcatatatgtacaattttgtttgtatttcctcctgttggagatgagtagtaacataatcatgggtaaatcgtcttctctgtgacagcgcaaacctttacgcccaataaaaatttgacagaaaaattctctatagtgccggggcacttcattcaaatttagtaaatagaacttttgtggcaatggacaggttcagctactgcatttcatatgcgaattcgctgctataccagttttgtggccccaaaatcacccggcagacagggtctggtaacacgtcataattctttccctacttacgaacgtaaaggaagctttgccaacttttagagaaatggctacattaattatgaactggagtgaaacaactgtgctaaaatgatacgatctagtaatttataggaaaaagtaaagatggcaaaaaacaaaaaataatgagagctaagggattcgaacccttgcatccgaagatatcagagattttagaggttaaacccacctaaatctgacgccttaaaccactcggccaaactcccattgtatgttgaaaacgatggattatacaagccattgggttagccatttatttctaaagtctttttcttggctgattacttattaatgagaaattggtaaagtttgacataattgttgggattccattgttgattaaggctataatattatgtataagaataaactagaagttctcctcgaggatatagaaactctcaaatggaatcgatatttctacacaataatattacgattatttctccttccgttttatatttttcattatcttattacattatcaatccttccatttcagcttcctttaacttcggttgcatcttctcataccttatgtcatcatctaactacccgtatatgataatatacgcgtagtaagactactagttaatgacgatagttgatttttattccaacaattaagttagcaaatgtgggaaagcataaattatttgggaaatgcatatatctccgcgatttccctagcttaggagctctttgggatcgatatcatttttgttggaatatgttggaatagaaatcaactatcatctactaactagtatttacattactagtatattatcatatacggtgttagaagatgacgcaaatgatgagaaatagtcatctaaattagtggaagctgaaacgcaaggattgataatgtaataggatcaatgaatataaacatataaaatgatgataataatatttatagaattgtgtagaattgcagattcccttttatggattcctaaatccttgaggagaacttctagtatattctgtatacctaatattatagcctttatcaacaatggaatcccaacaattatctcaacattcacatatttctcatggtagcgcctgtgcttcggttacttctaaggaagtccacacaaatcaagatccgttagacgtttcagcttccaaaacagaagaatgtgagaaggcttccactaaggctaactctcaacagacaacaacacctgcttcatcagctgttccagagaacccccatcatgcctctcctcaacctgcttcagtaccacctccacagaatgggccgtacccacagcagtgcatgatgacccaaaaccaagccaatccatctggttggtcattttacggacacccatctatgattccgtatacaccttatcaaatgtcgcctatgtactttccacctgggccacaatcacagtttccgcagtatccatcatcagttggaacgcctctgagcactccatcacctgagtcaggtaatacatttactgattcatcctcagcggactctgatatgacatccactaaaaaatatgtcagaccaccaccaatgttaacctcacctaatgactttccaaattgggttaaaacatacatcaaatttttacaaaactcgaatctcggtggtattattccgacagtaaacggaaaacccgtacgtcagatcactgatgatgaactcaccttcttgtataacacttttcaaatatttgctccctctcaattcctacctacctgggtcaaagacatcctatccgttgattatacggatatcatgaaaattctttccaaaagtattgaaaaaatgcaatctgatacccaagaggcaaacgacattgtgaccctggcaaatttgcaatataatggcagtacacctgcagatgcatttgaaacaaaagtcacaaacattatcgacagactgaacaataatggcattcatatcaataacaaggtcgcatgccaattaattatgagaggtctatctggcgaatataaatttttacgctacacacgtcatcgacatctaaatatgacagtcgctgaactgttcttagatatccatgctatttatgaagaacaacagggatcgagaaacagcaaacctaattacaggagaaatctgagtgatgagaagaatgattctcgcagctatacgaatacaaccaaacccaaagttatagctcggaatcctcaaaaaacaaataattcgaaatcgaaaacagccagggctcacaatgtatccacatctaataactctcccagcacggacaacgattccatcagtaaatcaactactgaaccgattcaattgaacaataagcacgaccttcaccttaggccaggaacttactgaatctacggtaaatcacactaatcattctgatgatgaactccctggacacctccttctcgattcaggagcatcacgaacccttataagatctgctcatcacatacactcagcatcatctaatcctgacataaacgtagttgatgctcaaaaaagaaatataccaattaacgctattggtgacctacaatttcacttccaggacaacaccaaaacatcaataaaggtattgcacactcctaacatagcctatgacttactcagtttgaatgaattggctgcagtagatatcacagcatgctttaccaaaaacgtcttagaacgatctgacggcactgtacttgcacctatcgtacaatatggagacttttactgggtatctaaaaggtacttgcttccatcaaatatctccgtacccaccatcaataatgtccatacaagtgaaagtacacgcaaatatccttatcctttcattcatcgaatgcttgcgcatgccaatgcacagacaattcgatactcacttaaaaataacaccatcacgtattttaacgaatcagatgtcgactggtctagtgctattgactatcaatgtcctgattgtttaatcggcaaaagcaccaaacacagacatatcaaaggttcacgactaaaataccaaaattcatacgaaccctttcaatacctacatactgacatatttggtccagttcacaacctaccaaaaagtgcaccatcctatttcatctcatttactgatgagacaacaaaattccgttgggtttatccattgcacgaccgtcgcgaggactctatcctcgatgtatttaccacgatactagctttcattaaaaaccaatttcaggccagtgtcttggttatacaaatggaccgtggttctgagtatactaacagaactctccataaattccttgaaaaaaatggtataactccatgctatacaaccacagcggattcccgagcacatggagtcgctgaacgactaaaccgtaccttattagatgactgccgtactcaactgcaatgtagtggtttaccgaaccatttatggttctctgcaatcgaattttctactattgtgagaaattcactagcttcacctaaaagcaaaaaatctgcaagccaacatgctggcttggcaggacttgatatcagtactttgttacctttcggtcaacctgttatcgtcaatgatcacaaccctaactccaaaatacatcctcgtggcatcccaggttacgctctacatccgtctcgaaactcttatggatatatcatctatcttccatccttaaagaagacagtagatacaactaactatgttattcttcagggcaaggaatccagattagatcaattcaattacgacgcactcactttcgatgaagacttaaaccgtttaactgcttcatatcattcgttcattgcgtcaaatgagatccaagaatccaatgatcttaacatagaatctgaccatgacttccaatctgacattgaactacatcctgagcaaccgagaaatgtcctttcaaaagctgtgagtccaaccgattccacacctccgtcaactcatactgaagattcaaaacctatatctgaaatcaatcttcgtgcacccagagaagttgaccccaacatatctgaatctaatattcttccatcaaagaagagatctagcaccccccaaatttccaatatcgagagtaccggttcgggtggtatgcataaattaaatgttcctttacttgctcccatgtcccaatctaacacacatgagtcgtcgcacgccagtaaatctaaagatttcagacactcagactcgtacagtaacaatgagactaatcatacaaacgtaccaatatccagtacgggtggtaccaacaacaaaactgttccgcagataagcgaccaggagactgagaaaaggattatacaccgttcaccttcaatcgatgcttctccaccggaaaataattcatcgcacaatattgttcctatcaaaacgccaactactgtttctgaacagaataccgaggaatctattatcgctgatctcccacttcccgatccgcctccagaacctcctaccgaattatcagactcctttaaagaacttccaccgatcaattctcgtcaaactaattccagtttgggtggtattggtgactctaatgcctatactactatcaacagtaagaaaagatcattagaagataatgaaactgaaattaaggtatcacgagacacatggaatactaagaatatgcgtagtttagaacctccgagatcgaagaaacgaattcacctgattgcagctgcaaaagcagtaaaatcaatcaaaccaatacgaacaaccttaagatacgatgaggcaatcacctataataaagatattaaagaaaaggaaaaatatatcgaagcataccacaaagaagtcaaccaactattgaaaatgaatacttgggacactgacaaatattatgacagaaaagaaatagaccctaaaagagtaataaactcaatgtttatcttcaacaagaaacgtgacggaactcataaagctagatttgttgcaagaggtgacattcagcatcctgatacgtacgatacaggtatgcaatccaacactgtacatcattatgcgttgatgacatccctgtcacttgcattagacaataactactatattacacaattagacatatcttcggcatatttgtatgcagacatcaaagaagaattatacataagacctccaccacatttaggaatgaatgataagttgatacgtttgaagaaatcacattatggattgaaacaaagtggagcgaactggtacgaaactatcaaatcatacctgataaaacagtgtggtatggaagaagttcgtggatggtcatgcgtatttaagaatagtcaagtaacaatttgcttattcgttgatgatatgatattgttcagcaaagacttaaatgcaaataagaaaatcataacaacactcaagaaacaatacgatacaaagataataaatctgggtgaaagtgataacgaaattcagtacgacatacttggcttagaaatcaaatatcaaagaggtaaatacatgaaattaggtatggaaaactcattaactgagaaaatacccaaattaaacgtacctttgaatccaaaaggaagaaaacttagcgctccaggtcaaccaggtctttatatagaccaggatgaactagaaatagatgaagatgaatacaaagagaaggtacatgaaatgcaaaagttgattggtctagcttcatatgttggatataaatttagatttgacttactatactacatcaacacacttgctcaacatatactattcccctctaggcaagttttagacatgacatatgagttaatacaattcatgtgggacactagagataaacaactgatatggcacaaaaacaaacctaccgagccagataataaactagtcgcaataagcgatgcttcatatggtaaccaaccatattacaagtcacaaattggtaacattttcctactcaacggaaaagtgattggaggaaagtcgacaaaggcttcgttaacatgcacttcaactacagaagcagaaatacacgcagtcagtgaagctattccgctattgaataacctcagtcaccttgtgcaagaacttaacaagaaaccaattattaaaggcttacttactgatagtagatcaacgatcagtataattaagtctacaaatgaagagaaatttagaaacagattttttggcacaaaggcaatgagacttagagatgaagtatcaggtaataatctatacgtatactacatcgagaccaagaagaacattgctgatgtgatgacaaaacctcttccgataaaaacatttaaactattaactaacaaatggattcattagatctattacattatgggtggtatgttggaatagaaatcaactatcatctactaactagtatttacattactagtatattatcatatacggtgttagaagatgacgcaaatgatgagaaatagtcatctaaattagtggaagctgaaacgcaaggattgataatgtaataggatcaatgaatataaacatataaaatgatgataataatatttatagaattgtgtagaattgcagattcccttttatggattcctaaatccttgaggagaacttctagtatattctgtatacctaatattatagcctttatcaacaatggaatcccaacaattatctcaacattcacccatttctcagaatagatgtgaactctttggttttcggtcagactagacgtcagtaaatagtttgaaagcgagaataaaaaataattgtaatggataatgaaatgccgttaattggtagtattaatgaagaatgaatatccatcttttcatgcaatataagagaaaaatataaaactgctgagatacggacaaaaatcacctatgtacaagtatttattttatcatatacggcgtaagaagatgacgtcaaaaattgaggaacagtcatcgaatttaatggaagctgaaatgcaatgatcgataatgtaataggataatgagtaacaacaattaaattgaagaagaaaaaatagtgatgctctgtagagatgtcatttcccttcaatgttgctatattctcctggcacattaacgtatgcccactattagtgcctttaacaatagaatcccaacaattattcaattattcacccataaaatccacctatttttcaagaaagcattagatttgctcattattatttattattaacataaaagtgcctttggtagttactatgtatttagtgtggtgacccgtattcctcatatatataagtagctaccacattatgttcaatcaatatatctttaactcagctcagcattgtctgaattgctcgcttaagtttttatcctgtgattagtgcatttacacataaacgtataccgggtgtacctcaatatactatgtaaacatttaaattgttaccataacaactcatgttattattaatgatcacttgacaacatataaaaacgaaagaagaaataataatactactatgtataagtatccatttccttttgtggattcctcaaaatggccagtatattcggaagtaacataatgtagttattcatcgatgaggttcacattctgtagcactgacccatcgaaagaaaagagtttatattttgataaattacataaaagctgaaaagtttgtagtggtcatagaaggtaacccacctcctaagaaatccagcatcatatgcataccaccacctccactatactcatcaacatcctgtggtaaaacctgtgatacgctatccaagaaccacactttgtcctttatttctgtggtataacctctcaataatgtatagtaagacctcattattctcatggcccctaggtcgcctgtcattaataatgctaaaaaagtcctatccaaaagagcaggaaatgagaagactctcaacataaaatctaattgatttttttcgcgatgcagtttgtccaaatatgctaaagttatcaagtacggtgaatcaatttctacgggatataaatctgctatactttcgtcaaagcatacgagttccgatatcgtattattgttatttccatcaccattattgctattgtcattatcattattatgattactttggttgattacagcttcacccaaatcactcaagtcaacagaaattaagttataaaacttggatgtctccgacaggggccatacagcagttagtatagttacggcgcctttaacatggaaaatccatgccgttggtgagctgcttgaagcatttgccaatgaatctaggattaatattagagcactagccaccaaagcatctgtgttatcatctgaaatttcgagcacagcctctcttaacagtctcaacgcttctaaacgatgactagacacgtagttatccaagccggcttcagttctggacaaatgagtggcgctaaaagccaaaattgtatgcatcaagaagggaaaatgaaaagccaaatccggaatataagtgctccatacttcaggaccagaaatgcctgcttcggttatggtatgccatacgtcagtacaatagtgatgaaaaagttttagatctatcaaattcaaatttgattttctagacagcccgactaattcagggactagtcgtgaggctgatgaagcgtttgaatggggagaagattgttgttgagtgtgagaatttgatgaacgtggagacaatgcctccgagttggataacaggtcacccattggggacgtcttcaaagtaggagaatttcccaaagcggtcctgttgtccggtatagataacaatgactttgtagaggttacattggatactcccgttgaaggggacgcaatgttttgatctatggaaggtttggacaacgtgtgtgggggactgattgtgagaccggtattgtcgattatcaagtttttgttatgagatagtatatcagaagcagtaactttattttcgtttccgttaagggggttattgcccgaattaacagcatccgtcttagtattatccaatgggttcttcgtaaattgcttgtttttgtcctcctgttcctgttgcatatttgcgagtgcctcctctgctgtgctaactttgattgctctgttattagatgtagcaaactttccgaggccaaataactcttgaaactcagaggccattccatttgcagcaccgtatggaaataatgtattgaagctcttcatattgaagttcaagcccatcttgttcaattgcgctagctggtcgaagggaatattgctgaagggggactgtgttccttgttgttgtggaatttgctgattttgttgttgaagttgtggctgctgcaatccattcgtcaccgaatttagcctaccaggcgagagtaagccgttaaggctacttgataaattcatggccgttgattgaaaactaggtgttatcggtatactcaatggcgaattccctggtagggccatgtttgggtggttgttgtttatcattgaactgggagctgtttgtgttatattattatgcgcttcagctccatttgcactgctgttggtactgttactggtgttattcactaaactcgctaataggtgcggtaacaaaagattctccatattattggatacggatggaggaacgctattaggggaattgctttgttcatcagtaccaacatgtggcaacagttgctgctgtaactgaacttgctgttgttgacgaaattgctgttcttgttgatgatgaagttgctgttgttgttgttgtaacatgatggcattgtcactcagatttttcttgcctaccctatcgtggaccgctgatgcaaattttgacgacgaagaatcttttcttcttcttggctgaatagggctgtaaacacagtccaatttcatgtttgtacatttcttgcaaaatggtttgccttcatcacattttactcttcttcttttacaattgtcgcaaccggtcttggacttgttatgaaacttccgtttccctgtcgaagtcttgctcactttcttgcccccaacctcaatcagttcagcatccttctctctttcttgtccagcattcccatcatcggatgtcatgttatgttagatggagatctatggataaacgaaatataaaccttaaatgaaaaaaaccgtcgacttaactcctctatattatgtaaaggcgaaatgttatttgtgcctttgaaaagtggaggtcttggttgcttctccttcgacgataatcgatttcggtgactagttagtagatgatgtaatcgtagacgcagggaacccttgcttttccccaatcgtaacaaaaaaaaacaaggggaaataaactattagatagtacgagttcgttaagttaaaaaaaaggctataaaagtcgaagaacgaatgattacgaccaacatctattgttcaaacttgccttcgttgagtttatcgaacgcgctcgtttaaatttttccgacaagaacgaggaacgagtcaccaattacgttttcggctctgtcggttgcaggatctgtaaaagcgatatagatacacacgtcagcatgaagctcttatgatttggcgagtagtgttagtacgttaaatgctacgactcggcatatactgtgctcgtttttatcagtttcatccgaggattgtagcctttttttttcatttgttgatgtttctctagtattttccgtcttgtagtggtttcgggtatgttgaacataaacattaaaaaagacgattaaataaacttgagtttgtacaaaggaaagctgtagtcatagagtatttagaaaaaaaagcagccacagtttacatgaagatgtgaccaatgaggaggcatcggtttgcctttgaatctcaatcgcttgaaaattgagttcttttcgaatgatgacacctccgagaaatggcatttctatgctagcgccactctaccctttcaaacgtccgtactcatatgaagtttcatccttcacgcagcgatctaaaaagttgtaaaaaaaaatacatttaggcctagctatatatgctactatgtatcattcagtgaaatggctgaggttatataaaatactgggaggtcgtttttacgctaaagcagaccttgcggatcttttcctgtagaatatatttgtagcataagtccaattttacgggcgcattttcaaaatcaaggtgatattgacatattttgaagagcacccaatgggctagctgcaagaacaaagagaccagaaagcctagaattaaatgccagaaaaatggaaatttattctagacaaaaattgttcggcacctctacagacgtttaacgaacctggtccggcctttgaggcgatcaaaaaaaggcccatttttgtgttccgcgtaattggtttgcgcctttccatggagcttggtgggcgacattctcaaactggtttcctgatacatcatgcacgcccgtaaagggtttaagtattgattgctagcctgaatgtttcatatgcataccgtgtctatgcaacgaatatatttcagaaaaaagcacgaaagccaaatttttgatgttaagaggtgtttttgcccgtaaacggagaagacgtggtaggactcgcaaatgtcgcgtttagcgttgaagaacatggaagtattgaacgtttggggcttgacggctcgacttttttgcactactccgccttgaacagacggatgatcctggcgcaagaaacaaagagaatcaactctgagcaaagcgaaaaaatgaaatacaacgataataaaaggataggaaggtgtatatataagttaattttagatatagattaagaaaagatgggcatatactaatatgactacaaaattgcacattttttacttttcttgataacaggaggctccaaggcggccacgatagcttcatcgaatacattcttcaaaccgcgttgtgttagtgccgaacactcgacatattttactgctttcagttctcttgctaacctggaaccttgttctgatgtaatcggacgtaatctttgtctttgcaacttctcgatgattaccttgtcatcccttagatcaatctgcgtaccgacgaccaggcatggtacacctggacaatggtgatgtacttcagggaaccatttttctttaacgttttcaaaagagggtggggaaataacactgaaacaaaccaaaaatacatcagtagaaggatatgacaagggtctcaatcgatcgtaatcttcttgaccggccgtatcaaacaaacctaacgtatatggttcatcaccaatcatcacagtcaccgcatagttatcgaacactgttggaacatagtcggctggaaattgattcgttgtataggagattagaaggcacgttttcccaacagcaccatcaccgacaacaacacactttagcgtttgcattttgtggaagagctaatacgtttatttcttgttttataagttttgcttctctaattcgtttgttaacctatctcctcaggaaaatagaatagtataataaataacgaatataattttttgcgacaaaggaaacctattgcaaaaagtgaagaatgacagagaaggataatcagtatatctcggtacacctggaacctatttatcaaaacgctgctcttgccttttccaagaatcgcgtctatcatcgatcaatcaaccttgtttgcttttttttatcactttttcccgtatcttgtttcatttggaagggcccaatggaagcagtattacccgtattgaatgacccttgaatcgacggtggaagacatctttaatgcgatgtttagaagacaatgtgccgtatttacctgtatatgtggattatctaacagtctacaatacaaaattaggtgtaacgtagctacaacagttgatagaaataatgcaactttttttaaaaaaaaaagagaaagtgctcgaggtggggattgaacccacgacggtcgcgttgcttttaaaggcctgtttgaaaggtctttggcacagaaacttcggaaaccgaatgttgctataagcacgaagctctaaccactgagctacacgagcattttcgaaagagacgtaaattaaattgttatttataccgtagatgattgtttttcacgaaattacccttttgagttccggcttgtttcgttcaacagtactaccactgataagttagcttcattattggaagaaggttgataaatgaaagaagattcacgactatgcacggcaactggtaagtaatacacgggcccagatatttattttaattcttggaaagaaagtataaatttataggttcgctatcagtaagtatacgaatttcaaactacgtcatatataatatccaaaagaagatgaaggcgatgcggtcactctaggactacaacttatccatcgcctcatttagtgcattcaccgcaatgtatacatctgaaaatgtattatataagggagcaggagccaatctaattacgtttggtcttcttgcatcgccaatgacaccatggtcatgcaaatattggaaaactttgggcataatatcctcttttccagtgtcagaatcgaagtaaagtgacaattgggcgccatgttcttcatctgtgcttgttggagttaatattgtaaaaaaacatggtaatttctcgatccttaaagggtgtttgtaatacttggaggcttccaacagttccgtcatatagttcgtcagcaacaacgatcttttacgaacttcattaataccattaaacttcgcaaataattccaatgaacttctcaatgccactgtgtcaataacgcttggattagattgcctgaatcccaatgctcctggaatcggctcgaatacttccagcatttgaaatcgcttagcaggatcattgccccaccaaccagctaatcttggcaaactttccttagcagggtctggtttagtatgcttcgagtggacaaataagccaccaattccaccaggcccggcattcaagtacttgtaagaacaccaacaggcaaagtcaacaccccaatcatgaagttgcaatgggacgttccctacagcgtgtgctaaatcccatccaaccaatatgtcggggaattggtgggcaaatgaggtgattcggccaatatcgaaatattgccccgtgtaatactgaacacctgacaaacagaccagcgccaattcatcttgatttacctctatggtatccaggatatcttgagttctgatataagtctctccctcgcgtggctcgatctgaataaaaacattctcaggttccgaaattccatgaattttgcactggttgtagaaagcataatagtctgatggaaaggagcccttttcaaaaaggatcttgaatcttttctcagtaggtttataaaacgtaattaacaatgaattcaaatttgcagtgagactattcattactgcaacttcattttcttgagcacccacgatgggggctagtagtggaagaataggtaagtcaatgctgacccaaggcacctttcctctggcttcttcaggatgtttgaaatgcgattccacagcacaatcgctccacgcatctagctcagcattaattgaattcctagttgacttcggcatcaaacctaaagaattcccgcataagtacgtcacaggcttatcgtcggacgatagtcccatggatttaaatgtagggatgttgaattcatccctcagagattccggatattctccgtctaattccaaagctttctccataattaccagtttgtttcttttttccacagaatatttaggcttaatatgtacgtattgacagcatatatatttgctgtcttgaatttattatgctaataaataattatgtttttcaagcgcagtcacctatttccaaagcgatgggtttgtccgtgccgtagacggcatcccgtcgttttaataaccgttataaaaaccgcccccatattttcgtgggttgacgacgacaggcgtggacgacgttaattgacgtcgtcataatatatttcatattatgattttttccctcaccattacttgttctctcaagtaggagtatctggcacttggacggtgatgtcctcatcagcatcaattgcttcgtctggatatgagagaaaatcagaggatagtgggccagtgatagtttttctccctcgtgaagcagcatgttttaccaactcagaagaaacgccatctttttctgggagcggagacaatttttttgttctccggacatttgcaaattgtttttccagttctgtcacagctattttcccggctcttttgcgctgttgttcatctcttttggcctcaacttttctcgaagagactactctttcctgttgtgtttttacatttattttggaggaaatttccgataatgctatttggcgttttattttaatatttgggcttattaaatcaaacttatatttgctggcattccatatgacgccggtgtcatttttctctaaaaatttcatgccagaaaatattattgatctaattcgcagaacacattcttcttttggagaaagcactttagtcaatgtagggcatccaattatattattaatcatgtcgggagaatcatacacataatcgtcattaaaatctgttagtgcaaagttaatgcaagaaaattccctgaaaataatatcttctctaaaaagatagcttcttttcggcctgtggctatatatatttcctgaacaattcagtggactatttatcaagtcgttcagcaacaaggcgaatgaagtgcaaaacttcctgtgtctgtgagtgtactgcaaaatagatctatatgacttaatccagcacataagcaaacgaataatggctagatatcgaaagtcttccatgtttttttgccaggagggtttgatgacgacgtctatgatattagcaataaaatcaaagctcaagtctaaaaaaaaaacctggcgctcactcaaatctgcatatttgagtttgttcttttgttccttactttttcgagttgtaaacataagatcgaaacttcccattgtggcagccaagttttcaagtataacattaatattacctgaatgatactttaatgcagccatttgtaaatgctctttcaataaccaacaattagaagcacgtgatgcgttccatgactgtggaaccaaagtgtgttctactatcgatagaaattgcaaaacaatttgaccttcaaagaatgatttctcacctttgagatcttttgacacaagaattgccaattttttcatcagacgtcttctttccggaaaatcaggagtcaaaatgaaatctttcaaattgtttaacgcacatttagacggaatccttaccaatgctcctcttactaattcaaagaaatacagtgagaatttcccagtgatcaagtaaattttcgctcgttgaaaataagtatctccaacggctgggagatagagtgaggcaatattcaagtacctaatagacttctcaaaaccttccacactcttgggtttgttagacggcttgtttagtagtgttttataaaaatgtgtggaacctagattaatcacgcatctttgtagtgagattacaatggaaaacgtcagtggattactcgtgtttaagataattttctcatgagttgaaagtccatctgtgtattgcattaaattcaacttcgcgaagagagcatttgaaataacggaattcatatcgtactttgcgcataggtgttcgatgatgtcatagtaatacctgtgtgtaattttgaaaaattgaatcatttttttttgaaaaattctaaaaactctgaactttcttctgttacttagtcgcatgatatcatggaaccagtgctcaaaccattggagtgtaggttcgtgaatttgaagccataaaagtttcagaaccaatggtatcacggaatcatttatgcgttcgtaattgttattatggtacatattttcttgtttcaaaagtagctcttcgagaaacctagtagatttgcgatgtattccatccaggaagcatctgaacgtgatatatgcattttcatcgcatgtcaaccttgatgttagatgtttatccagatgcgcacgagcgttcttgaaaaataatctcatacattcttcgttaacttcttcattatccattatctatggtggcatgtgtcatttaatggaatatactttttcccctgataagtttgctaaaaacggtcggatcatacaggcatgttaacatttccattatcctttttgacattggataatggcgtgaacgcgaaaatcacattgataaaaaaaagcagtttggcgaattagtaactgtcaataaagagggcatcgcttttgaaagcaccttcgtctgtgcgctcgcttcagctacgtaaaggtgtattatagacaataatgaaagtgctatgtgtcgcagagaaaaattctatagcgaaggcagtttcacagatcctaggaggaggcagatcaacttcaagggattccggctacatgtatgtaaagaactatgatttcatgtttagtgggttcccgtttgccagaaatggggctaactgcgaagttaccatgactagtgttgcagggcacctaacaggcattgatttcagccatgattcgcatgggtggggaaaatgcgccatccaagagttatttgatgcgccactgaacgagattatgaataacaaccaaaaaaagatagcaagcaacatcaagcgagaagcgaggaatgcagactatctgatgatatggacagattgcgaccgggaaggagagtacatcggttgggagatatggcaggaggccaagagaggcaacaggctcatacaaaatgatcaagtataccgggcagtcttttcgcatctcgaaagacaacacatattaaatgcagcacgaaacccaagtcgattggatatgaagagtgtgcacgctgtaggcacgcggattgaaatcgatcttcgagcaggtgttacattcaccagactcttaacagaaacgctacgaaataaactgagaaaccaagccaccatgaccaaggatggtgcaaaacaccgcggtggtaacaagaacgactcacaagtcgtatcgtatggtacatgccagtttccaacgctcggctttgtagtagacaggtttgaaagaatacgaaattttgttcccgaagagttctggtatatccaattggtagtcgaaaacaaagacaacggcggaacaacaacgttccagtgggacaggggccacttgttcgaccggctgagcgtgttaacgttttacgagacatgcatcgaaaccgccggcaatgttgctcaagtagtagacttgaaatcaaagccaacaacgaaatacagacctttacctctgaccacagtggagctacaaaaaaactgcgcccggtacctgcgtctgaacgccaaacaatcactagacgcagcagaaaagctataccaaaaggggttcatatcgtatccaagaacagagactgatactttcccacacgcaatggacctaaaatccttggtcgaaaagcaagctcaattggaccaactcgctgcaggcggcagaaccgcctgggcatcgtacgcggcatcgctgctccaacccgaaaacacaagtaacaataacaagttcaagtttccacgaagcggctcccatgacgacaaagcgcatccaccaatccaccccatcgtaagtctggggcctgaagcaaatgtttcgccagtggaaagaagagtatacgagtacgtggccaggcactttttggcatgctgctcagaggacgccaagggccaatcgatgacccttgtgttggactgggccgttgaacgtttctcagcttcaggtctcgtagtcctagagagaaatttcctcgatgtttacccttgggcccgatgggaaaccaccaagcagttaccgcggcttgaaatgaatgccctcgtagacatcgcgaaggccgaaatgaaggcgggcactacggcgccgcccaagccgatgactgagagtgaactcattctcctcatggatacaaacggcattggcacagacgccaccattgcggagcacatagacaagatccaagtacgtaattacgttaggagcgagaaagtaggcaaggaaacctacttacaacccacgaccctgggtgtctcactagtgcacggcttcgaggccatcggcctcgaagactcctttgcaaagcccttccagcgcagagaaatggagcaagacctcaagaaaatctgcgaaggtcatgcctccaagactgatgttgtaaaggacatagtcgagaagtataggaagtactggcacaagacgaatgcctgcaagaatactctcttgcaagtttatgaccgtgtcaaggcatccatgtaaggcgtttttgccgccctttgtcttcaaaaaagctctccgcttaattgcatgattcagctgactgcatatgtgcattttcagtaccagccgcaactgcatcaaaccatgcagaagtcgccgccacagaagctccagcgcgccgcgtaaacgcatgttggaaggcgccccaattagcatattcacgcgcgactaccaaacgcatagggaaggtttcagagagccgatgagcagcggatgcacagagtacggccataaggctgcaaagcgcttggcaggaatgggcgttttctagaggttgccttattgatttatatggaagaggagaggattcatcgatcgggcttctaaggcaaatagtatgcatacctttttcgggtagttgaagagaaaagaggaagagaatagaaaaaaaaaaaaagcgaaatttttacatcctctattgtaatgtaatttctttttttttattaggtatatatgtgagatacaattctcgaagtcatcgggaagctttaccatttcatttcctattccagaactcatattagcatctattgttctgagattcatcgcaacatcatttaaaggactgtagagccaattgcattatatcaatatgagtttcggtagtaaagtctccagggctttgagatttttggaaattcctgtcaaagacagggcatctgtgagtttcttgaagaacccggatttgcaacctattaagtcggctaaccaaacatgggggttctggtctaattttgcatattggggtgttatgtccttttcagtgggtacatggatgagtgcctcttctgcactaggtgttggattaagttacccagaaaccattggtacatttatcgtcggtgatgtgttgaccattattttcacattggcaaactcgtgtcctggttacgactggaaggtcggtttcactttggcccaaagattcgtctttggtatttacggttctgccttcggtatcatcatcagaattttgatgagtattgtcaactacgggtccaacgcttgggtgggaggtctttgtatcaatatgatcttggattcatggtctcaccattatttgcacctgccaaacaccttatcttcgaaagttgccatgaccactaaagaattaattggttttatcatcttccacgtccttactgcattctgttacttaatgaaaccctaccacatgaactacattttaatttggtcgtgtgttgctacatttttctctatgttgggtatggtgatctatttagctaaacaggctcacggtgttggagaattgtttacctccactaaatccactgccactggctccaccaaagcttgggcttgggtttatatgatctcgtactggttcggttccgtttctccaggttccaccaaccaaagtgattactcgagatttggttcctccaattgggctatctgggccggtaccatctgtgcattgttaattccaaccactttaatcccagtttttggtgttattggtgcctccacctgtgacaaactatacggtgaacaatattggatgcctatggatatcttcaaccattggttgacaactaactattctgcaggtgctcgtgccggtgcgttcttctgtggtctttcatttgtcctatctcaaatgtcctacaccatctccaactgtgggtttgccagtggtatggatttggccggtttattacccaagtatgtcgacatcaagaggggtgccctttttgccgcatgtgtctcctgggcttgtttgccatggaacttctacaactcttcttctactttcttgactgtcatgagttctttcggtgttgtcatgactcctatcatttctgtcatgatttgcgataacttcttgatcagaaaaagacaatactccatcactaatgcctttattctcaagggtgaatactatttcactaagggtgttaactggagagctattgttgcctgggtttgtggtatgacccccggtctacctggtattgcttgggaagtcaataatgactatttccacaacactggtattgtcaatttcttttacggtgactccttcttctcgtttttgatctcctttttcgtctattggggactatgcctcctcttcccattcaaaattactgtcaaacatgatgacaaagattattatggtgcctttactgacgaagaagcaagaaagaagggcatggttccatacagtgaaatttctgaagaagaaatccgcgcttacacattaggcgaaggttacactaccggccacgagtacagacctgaaggctccgacgatgaaatacctgagttggtcaaaactagctctgaaaacaccaatgagtttgaaatagttcatcataagaataatgaaaagcaatcctccaccgccagtgaaaaagctgcttagtgggaaataaaattgcaaaaaataattaagaataaaatttccctttcatttaatggctctctgcactaatttttttacctacgaaattttccttcgttcacacttaatattaaataacagctctttcctaataataacatatacactagatatataataccaaataaattaaaaaaaaagaaaaacaaaaaataacgtagctttgttacagtcgtaaaaaaaagaacaataaaccaatcttattgccagcgtctaactagtcctattatattccaatatattaaggggtaaggactactattattcgccctgaattgaaatcttttagaaagcacctgttctctctctggtgttctttttttctcatctattatctaatttcttcaaccttcgttatttgttgttattccgtaatcgtggtgctcaacttttgaaatttcacttgtttaccataacggaacataattaaaaatttgttcttgaaagtcacaagcactacgtgaacacaaaattaaggcaagagtgacaaagtaaccctcacaaggagcctgtcgttggttatattggaagctatagatataatcgaatccaatgactggtcctggacctgaaataaataaggaggagcaccccagttctccgggcaagaaacagataacatataatagtatacccaagaatgcaaatctaattgatggatctacgaattcatcgaagaggccaattgaaaagtatgacaagagaatagccgacccaacaaaaagctattttccacatagcatatcaagaacaccaaggagaaaatatacttacattctagtcctcacatcactaaatggaacttttgagagcaaacatgtggtgataccatttaaaccagatggtttgaaattgggaaggcctgttgctaatagtaatagcagctccagttcatcgctcaggggcggtaaaagagtggattcacacactttttcccaagtaaggtccgataatggtaatttcgattcaagagtactctccaggaatcatgcattgttaagttgcgacccgctcacgggtaaggtatatatacgagacttaaaatccagtaatggtacgttcattaacggtcaaagaattggctcaaatgacgtagaaatcaaagttggcgatgtgatagacttgggaacagatatagatacgaaaattgagcatcgaaaaataagtgccacagttgaagaactatttgtacaacctttattagaatcaccgatttttgaaaatgaagatagtgatgattgccatacaattacagaaaaagaggaggctgctgccataacaagtcacatatatggtgattccaacaacctagaattggaagaagttatcctgggctctgatacagaaatactgagtggaatttttattaataattgtattggtacgagcccgactttatctaatatcatcaaaaccctggcaatggaaattccattttccaaatgcgataattttaaattacagtcgatggagaatttcttaattaattatacgacacatctagaatacacgaacaaacttttagtggaaaaaaatgatcagcaactggtaaagctgcaaaatggattaagaaggaaactgtcggggaaatacgaaaagattatcgaacaaaacagaaatcaagtaaaacagttggaaagggaccatatgtttttcaaaaagtcatttgaagtgaagaaaagaagaaataatgaaaagcaaaaaagcatggaaagggaaatagaagacttgaaaactaggttagaagtggaacgatataagaattcacaaatgatgaagaagaacaaacagaaagaacaagaactctcaactgcatctaaaaaaaagactaccgaacatgacactagaggcgtcccgggcatgaatcctaagggtactgacaaatttagcatcaagaacacgctatgtaatcatttcacactattaacatttggaactatttccatcgggattatagctattgtcttcaagatcctttcccccaactagcatcgtaaatacaagacacacacgatccgcttttcacgtcagagattattatatacgtacgtatatatgtaatagatattcacatgtaaaaaaaggtaagcatcctttcatttaagaaagtatggggggagtcatccgtctcacggattctttttcaaaatattgacgtcgtcaatttgcattctttccaaagtttttattcctagcagctttgtcatttctttgacaaaactaattgctacactttgcacatttacaacagcatcgggtcgttgttccataattgaagtagtcagtgtatttttcaaaccgcacatttcaaaactattcatatacgatagatctgtattaacattaattgctaccccgtgcgatgttatggaacgtctgacgtgtattccaacactagcaactttcttcttgccattttcaacccaaactccagtgtcctttgtagtcatagcatctaagttcaaaggcttgtcagtgtcgtcgcacatcttggtattcttcaacgttctgatagtggcctgctcaatgcatgaaaccaagcatttagcagggaaactttgaaatgttttcaaatctaaaataatgtaaataacaatttggcctggaccatgaaatgttacttgtccacccctttccacttgaacaaactttggtcgtgggttgtccttttgcgtttctggaatgaaactttcataagccgctatctgatctggcgtcatagttttcttaatcctcttcccacctgtataagttggctcaaactcaaacgttaatattatcggattaggtttcattgccataaccttgtctaatattcttttttcgttatcatttattgttgcagtgcccttatattcttcatccaattgtattaattttctctcaatcttcgattgaatgtctttgatgtccaaatttgccctaactaatgtctcctgtatttccaatcctttttgaaaaggtattctttgagtgaattgtagatgtctgagcgtttgcgctgagggttttataggatgtgtcatttccttgagagcagaggcataagtgctaaagcattgtcgcctacagacattgaagtttgtgcatacggactggcgaatacacctcgacatggggctgaagctttcgacaaatcttaaattgtgactttgtgcatgaaatttttatatgaacgttttaaataagtggacatagtccttcattcggtatatgcagatccggcatcaaacactttttcaagaaagtttgagtcaaaaggattaaaggataaagtaaaacaacaataacatctccgtgaagcattgagggaagggtttaactccaacaatgtcactgaacaacataacattctgtgtctcacaggatctggatgttcccctgaaagtgaaaatcaagtcattggaaggacataagccactgttgaagccatctcaaaaaatcctgaaccctgaattaatgctgatagggtcaaatgtattcccttctagtgatctaattgtatccttacaggtatttgataaagagagaaacagaaatttaactcttccgatatacacgccgtatattcctttcagaaactctagaacctgggattattggttgactttgcccatacgtatcaaacagcttacctttagcagtcatttacgcattattttgtgggaatacaatggatccaagcaaattccctttttcaatctagaaacgagcatctttaacttaaaagactgtactttaaaaagagggtttgaatccttaaaatttcgttatgatgtgattgaccactgtgaagtggtcactgataacaaagatcaagaaaatttgaataaatattttcagggtgaattcacgagactcccttggcttgacgaaatcactataagcaaattaaggaaacaacgggaaaataggacttggcctcagggcacctttgtcttaaacttagaatttccaatgttagagcttcctgttgtgttcatcgaaagggaaattatgaatactcaaatgaatattccaactttgaagaacaatcctggactaagcacagacttacgagaaccgaataggaatgatcctcaaatcaaaatttctttgggggacaaatatcactccacattgaagttttacgatcctgaccaaccaaacaatgatccaatagaggaaaagtataggagattggaaagagcatctaaaaatgcaaacttggacaagcaagtgaagccggacattaaaaagagggactacttgaataaaatcatcaactacccccctggcactaaattaacagcacatgaaaagggttcaatatggaaatataggtattatttgatgaacaataaaaaagctcttacaaagttattacagagtacaaatttgagagaagaatcggaaagagtagaggttttagaactaatggactcatgggcagaaattgatatagacgacgcattagaactattaggctcaacttttaaaaacctttcagtgagatcgtacgccgtaaataggctgaagaaggcatcagacaaggagctggaattgtacttattacagttggtagaagctgtctgttttgagaacctgtccactttttccgacaaatctaacagtgaattcactattgtggatgccgtatcttcgcaaaagctttcgggtgattctatgttactatctacatcgcatgccaaccaaaaattattaaagtccatctcgagtgaatcggaaacttccgggacagaatcgctaccaatcgtcatttctcccttggctgagtttttgattaggagagcactggtcaacccaaggttaggaagttttttctattggtatttaaagtccgagtctgaggacaagccatatttagaccagattttaagttccttttggagtagactggataaaaaatctcggaatatactgaacgatcaagtcaggctaataaatgtgctcagggaatgttgtgaaacaattaagaggctgaaagatactacagccaaaaagatggaattactagtgcatttattggagacgaaagtcaggcctcttgtcaaagtacgaccaattgctttaccactagaccctgatgtgttgatatgcgacgtttgtcctgaaacttcgaaggtatttaaaagctctttatcgccactaaaaataacattcaaaacgaccttaaaccaaccatatcacttaatgtttaaggttggcgatgatttgagacaagatcaactggtagtacagatcataagtttaatgaatgagttattaaaaaatgaaaacgtggacttgaaattgacaccatacaaaattttggcaacaggaccacaagaaggtgccattgaatttatccctaatgacacattagctagcatactaagcaaatatcacggtattcttggctaccttaaactccactatcctgatgagaacgcgacattaggcgtacaaggctgggttttagataattttgtcaaatcttgtgctggctattgtgttattacatacatcttaggtgtcggcgataggcatttagacaacttactagtcacgccagatgggcacttttttcacgcagactttggttatatcttgggtcaggaccccaaaccttttccgccattaatgaaattgccccctcaaattatagaggcgtttgggggtgcagaatcatcaaattatgataaatttcgcagctactgttttgtggcatattcgattttaagaaggaatgcaggcttaatcttaaacctgtttgaattaatgaagacttcgaacatacctgatatcagaatagatcccaatggtgctatattacgtgtaagagagagatttaatttgaatatgtccgaagaagatgccacagtgcattttcagaatctaatcaatgatagtgtaaatgctttgctgcctatcgtgattgatcatttacataatctggcacaatactggcggacctgattggttgataattggtgcttcaaaatttaaatttcgtcactctaattatacttaacatataaatggtaccttcaatatatcttcttagtaaaaagtagcatgattttgtgttaatttgcactttttttatttaaaaataaaaatcacagttaatttttcatgatcttgcaaagacacgcctccccctaatgtggcatatataacaattgtgaatcagaaaaactcaacactttaacataatggcgggcacgaaggctaaacaaacaagattagcattgaatgccttttttgggtacaatagaacagtactgaatgacatcatatatcgaaaggctcaagtcggcagcatcgtatcttgatacagttccagatgagcatcatgatttcagaaaacccaccgccaaggttgtaacgacgcaactgactattgctacttcactaggtatttttgctttgctttcgttctcaattctactaaaaaagtggcctagattatacgcaagcagacgatataaagatgacgggaaccttcgcttaccgtcctggaatcagtcaagtttattcggctggttaacagtgttgtataagatacgggacgaacagattctggaatatgcaggtttagatgcgtatgtgtttttgagttttttcaaaatgtgcatcaaattactttctattttttgtttcttctctgtgtgcgttatatctccagtaagatatcattttactggaaaaattgatgacggcaacgatgatgatgacagtgaaagttctttaatacatctggtaaaaagaattgtggagggaagtggcgatggtgacaatcattcagctcccgaacgtacaaatgtgtacctctggatgtatgttctcttcacatatttcttcaccttcatagcaattaaaatggcagttgcggaaacaaagcacgtcgtaagtactaggcaagcttatcttgggaagcaaaatacgattactgatagaacgataaggctctcaggcatcccgatagagcttcgtgattcggaagccttaaagaccagaattgaacaattaaaaatcggcaccgtttcatcaatcactatttgtcgagagtggggtcctttgaacaagctatttcattgtcggaagaaaatactcaaaaacctggaattaaaatattcagaatgtccaagggagctccgtactcgacaaccatattcggagaactatcatttattgggaaacgagcaatcaggcgcagttacacatggagaaaatgttccatcaagcaataataatgacgaggatactatactatattctcaaatttctcttggagagagaccaaaaatgaaaattggatatcgtggtatctttgggaaggaagtagatgccatagagtacctggagcagcaattaaaatttattgatgctgaaattattgaagcgaggaaacaacactactccgcaacacctacggcattcgttacgatggattctgttgctaatgcgcaaatggcagctcaggcggtattagatcctagagtacattacttcataaccagattggctcctgcacctcacgatatcaagtgggatcatgtttgtctttctagaaaggaccggttaacaaaagtttattctactaccgtatttataggcctttcaagtttgtttttagtcattcctgtatcatacttagccacattgctaaatttgaaaacactttcgaaattctggccaagcgtagggcagctactaaaagatcaccagtgggccgctaacattgtaacggggctattaccaacctatctcttcacattgcttaactttggaatcccctatttttacgagtatttgacttcttatcaaggattggtatcatacagcgaagaggaaatctcacttgtttcaaaaaatttcttttatatttttgtcaaccttttcttagttttcacattggcaggtacagcatctaattactgggcgtacctcagcgataccaccaaaattgcttatcaacttgctacatctgtgaaggagttctccttattctatgtcgatttgattatattgcaaggtattggtatgttcccgtttaagttgttattagttggtagtttgatcggctttcctctagtgaaaatcaaggctaagacacctaggcaacggaatgaactttacaatccaccgatatttaactttggactacaattaccacagccaattctgattttgattataacgttgatctacagtgtaatgagcacgaaaattttgacttcagggctggcgtactttattattgggttttacgtctataaatatcaattgatttttgccacagatcatttgccccattctacaggaaaagtatggccattaatttttagaagaatcatcgttggattgctattgtttcaattaacaatgacaggaacactggcaggattcgaaggaggatgggttttgtcatcttgccttttcccgcttccagtagtgacattatgtttcctatatgatttcgagaagaactatttgccgttgtcaaaatatatcgcattgagttcaattcgcgagtacgaaagagacaattctacggtgaattctgccaatgaggaagagtcgtatgcatacccttacgctgtgagtgaattagagggtccgatgttggattgaaatcccaaggtgctatttctatatttatatattttgttgtgaaaatgccaaaataagatttttgatacaagtaatactggatatttttttatttgcttataacaataaataagttcctgacttctgtagtagtagtataaactcctgatgtattaaattcttaataactgaaaagttaaactttgccacgaaaactataagtattggcttaaccatgaaatatcgtaataaagacacacttataaaaatctttatgatattccaataggaaagattagttacaatcttcaacgattcaataatatagagattagctacccacttaatgatactcatcgaaattagagtatcataaggccatatcaacatcaatatcggaaaaattttggcaccgtacgataataagatcgtatatgatatgacatcctttgaagaaacggaatagtgcttccaatgcaactttttcagtatgaaatactgggtaaaggtgtggaataaagaaacgtcaagaatacaataacttgcaaagtaaagatattgtattggtgggctccaggtaaacactttacttgtaatggtattgcgcatgattgccgagtcccatttgaagctctctggtaatttttttgaaagcatgatgagcttaccatcattattgttacggttcaaatagtagatgtatttactctcctcagtaacccaagttaaataaatctcgaatgataatagtagaagccaaaggcgatttaaccggtcatatttacaaaaccagttctttacgttaaataacaaagcttgcgtatagtcacgcaaacactggcaatcatttagcgcttttcttttcggatattttgagagatgcaattccaaagcattgaataccaagtgtctatatgcacctgcttttaatagaagcaaatcaatgaataacaggacattatctatctcaacatatttgtctactgtctcttggcaatatggacaatctgtcagctgaatgtggtcattcgagtacactgtataaagggaatctacgggccgcatgcacgttatgcaaatcatcgtttatcacagctaatatctactttttgatgcgcttcatccgttcactgacgcaccaaaccttccttctatgcaatgacaagaatttctcagcttgatttatgccattgatgtttctgaatcatcaattgttcacatagggctattcaatttggcccgctgtccctaaactgaaaaaatactaagaaaaattttgcaaaaaatctaaaatgatgaggtgaaagatcaaaaaagaaagatcaataattaagaggttggcaagtcatcctgatcgtgaaaaaaacttaacaagtacaaatagagtaatcagcattggaaaatgtctcgcgttggtgtcatggtattaggacctgcaggtgcggggaaaagcacattttgtaattccattatatcacatatgcaaactgtaggacgaagagctcatattgtaaatttagaccctgccgcagaagctaccaagtatgaatttactattgacattagagatttaatttccttagatgatgtcatggaagaaatggatttgggccccaatggtgcgctaatatattgcttcgaatatcttttgaaaaatctagactggcttgacgaagagatcggggatttcaacgatgaatatttaatctttgactgtcccggtcaaattgaactctacacgcatatccctgtcttaccgaacatagtgcgccatttaactcaacaactgaatttcaacctttgcgccacatatcttttggaagcgccatttgtgatagatagctcaaaattttttagcggtgcactatctgctatgtctgcgatgattctattggaactaccccatatcaatgtgttgagcaaactagacttgataaaaggcgacatcaataagaaaaaactgaaaagatttttgaatcccgatgcaatgttattaatggaaacggaaggaatgaatcaagcatccaaccctaaatttctaagactgaaccagtgcatagccaacctcgtcgatgatttcggtatggttcaatttttacctttggaatctaataatcctgacagtatagaaaccatattatcgtatgtcgatgatataacacaatgggcagaaggacaagaacagaaagagcctaacgaccaaatagatgtcgaagaatagttatagagaaaattatgtacgcttgattcatataaaaagaggtaaaaaaaaaaaatagcttctcataataaccaattcggactcgggaaagtacaagttcaagttttttattggtttctatatgtataagataaaaatacctagatctatttaattctctgtcttgggccacctggtgatttcttattcctggctgttaggatttcaacaccatgttcggtaaccaacagtgtatgttcaaattgagcactcagtttaccgtcttgggtggtagaagtccagtcatcaggccaggtcatatccttccaagtaccttcattaatcataggttcgatggtgaaaaccatacctggtttcataacaccaggtgttctattcttggcgtagtggggaatatttggggaacaatggaaaaattcaccaacaccatgtccacaataagttcttactacactgcacttattttcggtagcgtgtttttcaatatgatcacctaactcttggaaggtggtacctggcttacacattttaatggctagtttcaaacattctcttgaggtctcagtagtattaagagcttccttagaaatgttttcgccgacataatatgtctcattcaagtctgcatgataaccttggtagtataaggaaacatctaaattgacaatatcaccttccttcaagacagttttatcgggcacaccgtgacaaataacttcattgacagaggtacaaagcgatttaggaaagttgtaataattaagaggggaagggtaggcacctctcttaattgtttcattgtggacgatttcatctaattcatctgtagtgatgcctggtctgacatgggcagcggcaatatcaagaacttctctacccaacatacatgcctttctaatcttcttaatttgatctttcttgtatatagggatgttgttaagtctatcatttctttgttcactgactggtagcccattagcggcccagtccggtttaggaatatcttcagggacataccttcttggggtaagtggatatgaagccttcactttaccagaatatttgaattttgggaaaggatcataagcaccttccaagccgtccttagcattgtgcaaagctttgtgagctttgtagttgttttcataacagcttgtgtcgcagaaaatggaaacgatgccttgttttagacaaacagggcatttcatttgggacgaagtttctctaccacattgcaaaccggagcaatatatcttggtaggatgagaagcctgatcggaggtagtaactgttgtagttgcagtgctcattatacaatttttttgcttatttttttcttgctaggaatatacacaatagcgttcttgggatgaataataataatatcagtttttcttctttatatgaaaaatgaaaaaaaaaaaaaataagtaaaaaattttcgctttcttttcggggagcagccaaataaagattgctgctagtttaaatgagatggaccaaaagccatgggcagcagttctcccattgtcatgactttagaacgagaacctgtggaattaagcatgactattggaaagtccttgaccacaaattcattgataaactgcctgcaaacgccgcaaggggaaacacactggtcctcagaatcgccacaaatgaccatgcatttccatcctgagcgatggcctgccattagaacttgtatcatagcagatcgttctgcacatatacaattactgtagcttgcattctcgacattagcaccagtgaagataacatcgttatttgttaatatggaacaaccgacacggaagtgagaataggggctataggagagttcacacgccttcagtgccgccctttttaaggcttccagttgtctgtcttctatgccacctactttcattaccttatttctctgcttgagattctctgtttggttttcctagtttcttgtacataaacagtttgtgtttattttgtcaaactactcggaaattggcgagcagcgccttatcaagattacagtttgcaaatataaaaatgtaaaggaaagaaagcgtaaggtaacaagaagagaaacggggaagataatggccttggtctctagaaggtcgacaagatcggaaagcacctcaataacaaaggaagagcatacaggagaaggttcattgacgaagttgttcttccgatggcttgttaccttggagggtgatcaggatataaacgatggaaaaggttatatatcgttaccgaatgtctcgaattatatattcttccttggtggcaggttcaggacagtaaagggcgccaaaccgttgtggttaggtgttctccttgctattgtatgtcccatggttctcttctccatatttgaggctcacaaattgtggcatacccaaaatggttataaagtgctggtcattttcttctattatttttgggtcataacgctagcatcctttatcagaacagccactagtgatcctggcgttcttccgagaaatattcatttaagtcaactaagaaataattatcagatcccgcaagaatattacaacttgataacactaccaacacattcttcaatttcaaaagacattactatcaagtattgtccatcatgtaggatatggagaccacctcggtcttctcactgttccacatgtaacgtctgcgtaatggttcatgaccaccattgcatatgggtcaataattgcataggaaaaaggaactaccggttctttttaatattcctgttaggtgcaatactttcgtccgtcatattattaactaattgtgccatccatattgcacgggaatcaggggggcctcgcgattgtcccgttgcaatattgttactttgctatgcagggctaaccttatggtatccggcaatactgtttacttatcacatatttatggcaggtaatcagcaaacaacaagggaatttttgaaaggtattggatcgaaaaaaaaccctgtattccatcgtgtggtcaaggaggaaaacatatataataaggggtcctttttgaaaaatatgggtcacttgatgttagaaccaaggggcccaagctttgtaagtgccagaaagccacatgaagctggagattggagatttatggatttatcgccagcacacagctttgaaaaaatacagaaaatataaggaagtatagatataaagaactcagcgacacagtagtacgtaaaatataaaaaggttactgaaaggagtgaattccgccatagtataggttgagtatacgcaaataaacgttggaaattggctagaatgttaaaaaaaacattcattaaaaggttcttttcgtataacttttacaacaaataagtggttgtttggccgagcggtctaaggcgcctgattcaagaaaatatcttgactgcagttaactgtaggaatactcaggtatcgtaagatgcaagagttcgaatctcttagcaaccattatttttgccttccgaaaattttgaagctacatattagcactcttcttcagatgtcagacaacgtgcagcatctttttttcctaccattgaatatatatatagtaattacggcaaccgtttatataaaaattcaaaagattaaatattttaatatattagtgtctggtttaaaagtcatacttctctaatcactaccgtgaaaaaagcagttccataagtgttcattactgacttcttggtctaccacgcttatctcaaacttcgcatcatcgctttcctcattatccgtttcatcttgtgcttcgtcgtatttatcgcctttttttgacttctcctttcttttgcgctcttcgagtatacatttatatctgaggatgttttcttcaacggtatttctgatcatgaaattccacacaaaagtttcttcatcttgtcctatacgattattccttcccatagcttgtaattcatcactattattaaggataggatctagtaggaaaatatgttttgcatttatcaaattcaggccggcacctaaagttttcacattcaaaagtaggcaagtgacggaaggctggcgtttgaagttatttatagtttcgccaacattggctgtattagatagacatgccaagtgttcaatgtgatacaactttaataccttaccaatgacctttaaatattctgtcttttgagagtatagaataacttgtggcggatcagcgttttcctgctcactttttagcctcaggtaagatattaacttgatgacgaaatcaatcttagcaccaaaactttcctttatgtgaatttgatggacttcattaatttgatggaattgctcgtatttatttccgaataatttttctacttcactcatattggatataatcgagttttcatttgaattatcttgagacgaatcggcgccctctcttcgtggctcttgaatttctttttccctcttctccgttgagttcttgaacttaaagttatagacttccgatatactacagaaacctttgcatatagggcatttactatgggctcgtagccacgtaaggatacaactcttgcaaaaataatgtccacacttaatgatagcacctatttcaacttctcccaaacagatagagcagctcaatatttgattatcgtttaatgtgtctttcaatctggacaaattttttaaatatatcagccgtgattcaatgttattgatttttgcatctagtgtaccgcccaatgacttattgatagttcttattagatggctgagttgtggagcactcaaagagtgcaaggacaccaatgaatcggaaatcctctgtaattgactataatattccgtcttggcattataaatcgatcccaggattttcaaagattctcttacctgtttattgtacttaaacaggcttttactttcaacttcgtactgaagtaagtagtcctcaaaattttgaatggtagattcactttcattgcttgaggatatccgtcttactatcctgctgttcttcagttcatcaaaaacagttcgtagaggtgttcctgaaatcaagcgcaagctgttcaataactgcttttgatattttgaaattattgaaccttccggtaccaaatgcttcggaattttaacttctgattctgaagttaaaatattgtccctattctgtaaaattatctccaagcaaccaagaagactgaatatcttatcttgactgtcaatcgatgttgaatattcttcattaccgataattttattagtgctatcatcgtcctctgtcctgtggacaggttcatagataataatgagtaactcatccaataactcgttgaagtttttagtttgttcattcaacccttctatcaacttactcaaagacttgaaacaacgagatactgctaaattagatgagtagtcatttttgtggtcaaattcaatattgattaatcgcaaaggtatattgctcgtcataggagcaaacttagttctggccattttaatagtcatatcaacttttctagcctcagaggagaggattgacttcctcaaaatttctgcattcgcataattttcttgttctaaaagtctattctcttcaatttcctctaactcattttttggaaaaacatcagaatacaccacttcttcagtcttctcttttcgatgcttgtcgtccgcctcttctagcttacgagtgcccaagttatagtaaacagaaccgaggaagaagtagcaatcatgcagtaaattcatcatagcacgtaatcctttcttcttcaggtggttggataacattccgtcattgttgtgattatcatggtttttagcaccatttatttctctatcgctttcgtcgcctgaagatgtttccttctcaccaaacctctcgtccatatgttcgtcctcatcttcactgaggtttaacgacttatcaaacggatcctcaacgttgaatttttggcgtatgtgtatcatcaaatcatctctgattttgataaatgattcaagggctttggccggagtattggaaatttcaagttcatactgtgcctgcttgatcgataaatggaatctctctctgtaatagccaattaaactgtcaaatgcatccattcgcatggatattaagatatcgtctatatttgaaattcttgacaagtgcccgtgaaggcgcttctgtcgggtacttaaaatttctggaaataatgcatggcaacatatatatcgcagcctagacaaccattcgtttaaaaaggcattgcttacacggggtgatccactgccatccgaattatagccactcaactctaaaaaattgttccaaagatttaaatagttgtcccactcgataggcgcaaactccaggggaatgatgaagttgtgttgccgcggaatatgaatctgagacgcaacattggctttcgaatgccttatgcaaagatcatacctgtaaaaaatgttcatacaatccttgatagaaaaccgaacgccctttaattggcatacaaaatcattactagtgtaatctttagcctcatttcttagtttaatttcttcttgaagtgtccgaataaagtctacctcatcacaaaatggatgcagctttaaataagacatgatcatcctaaagttgtaaatgttctgtattggagtcccggaaacaccccaagtgtgtattctatgaagtaaactcgtgcattttgcagaatatgttgatgaactacgtagcatttgaacttcatccagaatgattctataaaactgcatcaaagctaacggtgaagaatagtcatactttgggcttttcaaccttctcgatctgatactacggttaaactcagcatgatggacctccgtggcaataatgttatatgatgtaactataatatcgtattggcacaattgttgaacagcttcgtccacagttttgcaatctttcattatctcattatatcctctataggtataccattttaaggaatttgcgtgtaattcgatttcttcgagccattgttttaagatagcattgggacagataatcaaagtcgtctttgtcttcgtgattgttctattttcatcgtcaataaatgttgcctctgagtccttcaatttccttctatttaagagtattagtgataaaatttcaatagttttgcccaaccccatctcttctgctaacaccccctttgcacaaactgggtagtcgccgcttaacctttccttcctatattggttgtacaaatgtgcagcatcttctgtagttagaatatatcctgttaatttgttccataacaatgatggccctacctcgtcagggctgcgtgcaatgagctcgtaaccgtatgcatagtactcgttcataaaatctataagccctacttcgtcgatgactgtaggtgtatcactaagagaattaccatgcccttctttaattagcatccactcaacgctctctctttgaaatggtaagaggttaacttttaggtctggtatagattggggtaagaacggtttgatctttgatagcctatctttactatattccaagatttgagaaataaattgtttttgaatgaagtttgaatggatatggctgtgcttgtgatatcgctcaaattcgttctcgtccctattagagaacgtcaagtccagtatttggttagcctccacggaaaaccggttgaatttattatttaaaaacttcaacttcaaattaaaagataaaacccatgttaaagaggaatcattgtatcggaatacgactggagagcattcaaaatctttgtaggacaaagataattcgtgtatacgactttttagtaatttttcaggatcgttaacatttgaatttttttttcttctctttcttgatggtttgcgttctaaagatttacgattttctaactgatttcgtagggccctttcttggtttttatgagcacatatatccaagatcagcggaagttgtttgtcaacagcgatttttgaattgttctccattttaaatccaatttgaaataaggatacggaatctgacgacacaacaagtgttgcctcgttatcattttcacaaggtaagatctctatatcaacaataaatttaaataactgcctaccgttgttggaaagacttattcgctctggtatttcgatatttaccgaggcaacgttgattaattcttttccgttcttgctaactttttgagttacagtctcttgttcctgatttagcgctggcaatgctgctatcactgaatcaaaagaaccattttctaggaaaaagtcgcatttttcggcagtcacgttgtactcccttgctaatagcgcacctactgcagacatttaccgtcgaataagttggcctttcctggagttcattcctttagacagcgcctagaaagtggcaaatcaatacattcatcagccacatttcatcagctgtagatctggaaaagacgggtagcagttcgagtgttccgaaaaaggaaaaaacgagccttatccttggtcagagatgcgagcaggtaattccttgagctctcataggagtgaagctatcccagactccttggatgtccctgtatttgcggtcaagtttgttctttgactggttcgtcatttcgagctcacttaaaaacaggagttattcagctacatcttcaagctaataaaacatccgttgcgcaggcactctttttagtagttgccatttcctttattcttgaaagtacgaaggctgaaaaagagccactacgatccaaaaaatcaccgttagttttagtcgtccacgagtacgttggcataaagtctagtaatctttttactttatagcaatcaagagaaaaaaggaggataaagggacatttatttgttattgttttttgttctttttaaacttttttactggctaggtttaaggttataattataaatccagtgattaagaggaaacctcgtcaagaatcctagataatagtaatcagcgacagttatttcaacgaagtcaaactctatctctggggctttatctctcctattgacatctaactttttacaaacgcttactagaaaagacggatcggccaaagaaaaaaaaagagtgacatcgaaaaaattaaagaaaataaaatcccagatagttcatacgttatttgaagtacaaacatttaacgattggaaaagacgaaagtattgttaagagtactgcttatttagagaggatcaaacaaaatctcttcgatgcttaaaataaaggcccttttctcgaaaaagaaaccggatcaggcagatttgtctcaggaatctaaaaaaccattcaagggtaagaccaggtcaagcggtacaaataacaaagatgtttcccagattacttcttcccctaagaaaagctttcaggacaaaaatatagttcagtacccgagtgttgtcgcagatgaccatcatatgaagtctttaaccgatgaattagtaaccacgatagactcggactcttcaccgagtgataatattaccacggaaaatgtggaaacagttacttccgtgccagctatcgatgtccatgaaagtagtgaaggtcaattaagttccgaccccttaatatctgacgaatctctttcggaacaaagcgagattatcagtgatatccaggatgacagtactgatgatgacaatatggaagatgaaattccggaaaaatccttcctcgaacaaaaggaattgataggttacaagctgatcaataaaatcggtgaaggtgctttttcaaaagtctttagagccatacctgctaaaaatagttctaatgaatttttaactaaaaactataaagctgttgccattaaagttatcaaaaaggcagatttatcctcgattaatggtgatcatcgtaagaaggacaaagggaaggacagcactaaaacttcttccagagatcaagtcttgaaggaagttgcactacataagacggtttccgctggttgttcacaaattgtcgcgttcatagacttccaagaaacagatagctattattatattattcaagagttactaaccggtggggaaatcttcggcgaaattgttaggttgacctatttcagtgaagatttatcaaggcatgtaatcaaacaattagcactggctgttaaacatatgcattcactaggtgtagtgcatcgtgatataaaacctgagaatcttctttttgaaccgattgaattcacacgctctataaaaccaaaattgaggaaatcggatgatccgcaaacaaaggcagacgagggaattttcacaccaggagttggtggtggtggaattggtatagtaaaactagctgattttggtttgtctaaacaaatattttccaagaacaccaagactccttgtggtacagtcggttacactgcccctgaagttgtcaaagatgagcattattctatgaaagtggatatgtgggggattggttgcgttttgtacacaatgttatgtgggttcccgccattctatgatgagaaaattgacactttaactgaaaaaatatcaaggggtgagtatacctttctgaaaccttggtgggatgaaatcagcgccggtgccaagaatgccgtggctaagctattagaactagagccgtctaaaagatacgacattgaccagtttttggacgacccatggttaaatacattcgattgtttaccaaaggagggcgaatcttcacaaaagaaagcaggtacttccgaaagacgccatccgcataagaaacaattccaactatttcaaagagactcctcgctactgttttcaccagctgctgttgctatgcgtgacgcctttgatattggtaatgctgtgaaacgtaccgaagaagaccgtatgggaacacgtggaggattaggctcgcttgctgaggacgaagaattggaagatagttacagtggcgcccaaggcgatgaacagctggaacaaaatatgttccaattaacgctggatacgtccacgattctgcaaagaagaaaaaaagttcaagaaaatgacgtagggcctacaattccaataagcgccactatcagggaatagcaactttcccttctgtttcaatctttttacctattcctttttaaaagatatatatacattaaactccttctacaagtatatattttatacatatctacagggcgtatatatacataacattttaagataagcaagtgaatgttgattcccgtttcttagtcaacacttctttctattttacccggtcgttaccctattaaaaaaacaacttacaatcattgttcgccccttccatacttactgccactcgcaaaagggcccaaccagggcaattacgtatcaaaaaatcatgacaggctgggtaataaatattcgtgaagaaagaagaaattaaaaaaagaaacgaagaagcaaaaaaaagaaaagactccgtttaatcactttcaaccgcggtttatccggccccacccatgcataaccctaaattattagatcacttagcacgtgaaaaagaaacgtttttaatgttttttttttttttttctttttctttttttgcgttggtgaaaattttttcgcttcctcgagtataattatctcatctcatctttcatataagataagaagttttataaaaaccttttgcatcaaaattttgtagaatatctctttttcttacgctctctttctttccttaattgttttctaaagaaccgtgtatttttctagttcgaatccatcgataacattaaaagatgtctgattcccagcaatccattaaggttctagaagaactattccagaagttatctgttgccactgctgacaacagacacgaaatcgcttctgaagtcgcttctttcttgaatggtaacatcattgaacatgatgttccagaacacttcttcggtgaattggccaagggtatcaaggacaagaagaccgctgctaacgccatgcaagctgttgctcacattgctaaccaatctaacttgtctccatctgttgaaccatacatcgtccaattggttccagctatctgtaccaacgcaggtaacaaggacaaagaaattcaatctgttgcttccgaaactttgatttccatcgttaacgctgttaacccagttgccatcaaagctttgttgccacatttgactaacgctattgtcgaaactaacaaatggcaagaaaagattgctattttggcagctatctctgctatggtcgatgctgctaaggatcaagttgccctaagaatgccagaattgattccagtcttgtctgaaaccatgtgggacaccaagaaggaagtcaaggctgctgctactgccgccatgaccaaggctaccgaaactgttgacaacaaggatattgaacgtttcattccaagtttgattcaatgtattgctgacccaactgaagttccagaaaccgttcatttgttaggtgctactactttcgttgctgaagttactccagctactttgtccatcatggtcccattgttgtccagaggtttgaacgaaagagaaaccggtatcaagcgtaagtctgctgttattattgacaacatgtgtaagttggtcgaagacccacaagttattgctcctttcttgggtaaattgttgccaggtttgaagagtaactttgctaccattgctgacccagaagccagagaagttactttgagagctttgaagactttgagaagagttggtaacgttggtgaagacgatgctattccagaagtttctcacgctggtgacgtttctactactttgcaagtcgttaacgaattgttgaaggacgaaaccgttgctccaagatttaagattgtcgtcgagtacattgccgccattggtgctgatttgatcgatgaaagaatcattgaccaacaagcttggttcacccacatcaccccatacatgactatcttcttgcacgaaaagaaggccaaggacatcttggacgaattcagaaagagagctgtcgacaacattccagttggtccaaacttcgacgacgaagaagacgaaggtgaagacttatgtaactgtgaattctctttggcttatggtgctaaaatcttgttgaacaagacccaattaagattgaagagagccagaagatatggtatctgtggtccaaacggttgtggtaagtccactttaatgagagctattgccaacggtcaagttgatggtttcccaacccaagaagaatgtagaaccgtctacgtcgaacacgacattgatggtactcactctgacacttccgtcttggatttcgttttcgaatctggtgttggtactaaagaagctatcaaggacaaattgattgaattcggtttcaccgatgaaatgattgctatgccaatctctgctttgtctggtggttggaagatgaagttggctctagctagagctgtgttgagaaatgctgatatcttgttgttagatgaaccaactaaccatttggataccgtcaacgttgcttggttagttaactacttgaacacctgtggtatcacttctatcactatttctcacgactccgttttcttagataacgtctgtgaatatattattaactacgaaggtttgaagttgagaaagtacaagggtaactttaccgaattcgttaagaagtgtccagctgctaaggcttacgaagaattatccaacactgatttggaattcaagttcccagaaccaggttacttggaaggtgttaagactaagcaaaaggctattgtcaaggttaccaacatggaattccaatatccaggtacctctaagccacaaatcactgacattaacttccaatgttctttgtcttccagaattgctgtcattggtccaaatggtgctggtaagtctactttgattaacgtcttgactggtgaactattaccaacctctggtgaagtctacacccacgaaaattgtcgtatcgcttacattaagcaacacgcttttgctcatatcgaatctcatttggacaagactccatctgaatatatccaatggagattccaaaccggtgaagatagagaaaccatggacagagctaacagacaaatcaacgaaaacgatgctgaagctatgaacaagatcttcaagattgaaggtacccctagaagaattgccggtatccactccagaagaaagttcaagaacacttacgaatatgaatgttctttcttattgggtgaaaacattggtatgaaatctgaaagatgggttccaatgatgtccgtcgacaacgcttggattccaagaggtgaattggttgaatctcactctaagatggttgctgaagttgatatgaaggaagctttggcttctggtcaattccgtccattaaccagaaaagaaattgaagaacattgttccatgttgggtttggacccagaaattgtttctcactccagaattagaggtttgtctggtggtcaaaaggttaagttggtcttagctgccggtacatggcaaagacctcacttgattgtcttagatgaacctaccaactatctggacagagattctttgggtgctttgtctaaggctttgaaggaatttgaaggtggtgttattatcattactcactctgctgaattcacaaagaacttgactgaagaagtctgggccgtcaaggacggtagaatgactccatctggtcacaactgggttagtggtcaaggtgctggtccaagaatcgaaaagaaggaagacgaagaagataaattcgatgctatgggtaacaagattgccggtggtaagaagaagaagaagttgtcttctgcggaattgagaaagaagaagaaggaaagaatgaagaagaagaaggaattgggtgatgcttacgtttcttctgacgaagaattctaatctttttgatcactgctttcacagttttctttaagatttttattgatcaataatttatgtatattttaatttctatgtttttgtaatattgtttattttggtaaaatatagacgcaacttccttattataaagaaaggcattatttaaaagaaaaagcgttccattagtcagacatctttttttttcatacattcttaagctcaggcaaattgagcattgcctcatacccttttcggtaagagggtaacgaaaatatttttttggaagaataaaaataggtgacggatcatagactaggaagctttaaaacatgattgagcgtaatattatattccttctagaaaagataaaagagccaagacctaaaattttttcatccctgttctattaaaattgtggaaatgaggtttttgaggggatttgtattttctttggctttcactctatataaagtaactgccacggcagaaataggatctgaaattaatgtggaaaatgaggcaccacctgatggtttatcctgggaggagtggcatatggaccatgagcatcagctaaaagattacactccagagactttcttcgcgttacatgatatcaagaagaaaggatttttagatgaaaacgatattctatctctctacgggttgaaccgtgaagaaattgtgggggctggtgatggtatgggacaacacgatgaatctgagaaaattgacaatgaaatggctaagcgtgttgttagccttattatgaggttattggatgttgatgataataccaaaatcaccaaggaggaatatctacaatttgctaagagaggaaacaagttccctgaccttggcgttggtgtaggtcaccactccgattttgagctagaatatgaaattcatcactggaataagtttcataaggacaaagatccagacgttaaagtcgttcacaaagaagacatagaacatgaattgcttcatcatgaacatgaaattgaacatgaagaagaaattcaaagaggcgcttctagagctactgtaataactgatgacgaactagagtctagaatagagctgaaaaatattcccgagaaattcaaaaatggaattttttaatggacttggtcaagatgaatagttgagactgagaaaatattcaagacactatgtatgtagtcaattagcatgtagtaagtaatcaaagcacttaaaatatatttttaccatcgcatcgttgtgatgcctctcctttgtgattaactatctactttaaacgttctattttctatgttctaattacgtatgtattggtcttttctctccgatggtaacaagaagcgtttcgggaaacagtggcacctccttgtcccttaaatgtcgaactttaacagtataagtacaaagtgaaaaaaaaaaaaaaatggaaatatctatgatagtgatatgatagaagagctatttgaatgctatgttgtcatatttagccttacaaaagggaaaaggcaaacacagtcttttgttattactataggaaagatagaattgatattaaaacagtatgaagttattgcatttatatgaagcgagcttgaagagaaggcccaaaactacgaatgcgataatgacaggtgcgctatttggaattggtgatgtttctgctcaattgttgtttccaacatccaaagtaaacaagggttatgattataaaaggacagctagggctgtcatctatggttctttaattttctcctttataggtgacaagtggtacaagatcttgaacaacaagatttatatgcgtaacagacctcagtaccactggtctaatatggttttacgggtagctgtcgatcaattggcgtttgcgccgctaggtttgccattttatttcacctgtatgtccatcatggaaggtagatcatttgacgtagctaagttgaaaataaaagagcaatggtggcctacacttttgactaattgggcagtttggccacttttccaagcgattaacttttctgttgttcctttacaacataggttactagctgttaatgtcgttgcaatattttggaacacttacttatcttataaaaactcaaaggttatggagaaagacaaggtacctgttcattatccacccgtggtcgaataactggataagaaatcctgattttgaaaatatttggaattcaactagcatatttatcagaccttgttccttggggtactggaacagcatatacctaatagactttcggcagagagcagaccaacttcataaatatttgagtcaccaaagttggctagcaatctgcttttcctttacagatgtgcttggtcaggaacaatttatttaattacattcgtacttcttttatagaggaaatagtagctaacatttcactattgcggtcatgcctgttgttcttcagctaccgtttatgcaaaggtgtttaattaggtgtgagacttaagtgggccttttagtaccactgtgggttctggacctttatataatatttcattttttcaaaggttttttcatatgccgttaaaagaggtcaaaacatagacccgaggaacatatcttgtaaatcgctgcgttatgtatgcatattgtactcctaccttcgtaactggaaagaatcagtctgaaagtttattgagcctgaaacggagcaagattatagttgaatgtttcttattcggtgttgatagtagatgatgaccaaagctttttttaacaaactaccgtttgaggtattccgtcggtacgttaggacaggtaaaagcatccctcaaagaagccccaggacaagaaaatctcttctggtgggtgggactattgcatcagcagtagttttgtacaactttaatgacacttttcatgattctgtaaagcacacggcactgacgactaaaagaatcgctgtcgtcacacaagctaccactcgttgcttctaccattacaagagggctctaaataaaagctatgagaacaaaaaagaacgagaagttgccttaaataaatgtcataagatgtgtgccttaatcacgttgcatgcgctacgatcgaatggtgggatatatatcaaattaggccagcacattggggccatgacctacctgttgcctaaagaatggacggatacaatgataccgttgcaagaccactgtcccgaatccacctacgaagaaattgatgagttatttaaagaagatctaggcaccagcattgaggatatgtttttagaattcaacaaaaccccgataggtgtagcttccttggcacaggttcatgtggcaaaactaaaaaatagtgacggtaaaggttctagtgtagctgtcaaatgtcagcatccatcgttgaaggagtttataccattagatgttatgctgacaagaacagtgtttgaactgctggatgtcttcttccctgattatccgttaacgtggcttggtgatgagcttcagtcttcaatctacgtggaactgaattttaccaaagaagctgaaaatgcagaaaaaacccgtcattattttagtaagttcaagaagcaaacagcattgaaaatacccaaggtcattgaaagccacaaaagaattttgattatggaatatgttggaggcaaaaggttggatgatttggagtacattgacagtcacggtatctcgcgcagtgaagtttcgagttgtctctctcatattttcaataacatgatttttactcccaatgtaggtattcattgtgatcctcatggaggaaatctggccatacgatctgttaagcccgctaaagataatggataccataactttgaaattgttttatttgaccacggactctatagatatcctagcacgagaacaagaagactttatgccaaattttggttgtcgctcctattcgacaaggaccagacaaaaatgaagaagtatgccaaaggattcgcaaacatcaccgacgaacagtttccccttttagcggctgcaattacgggccgtagcattgatgctgctttgaattacgacatttcaacgagtcgaacacaagaagaaatggacgtcatggcaaatgggatcttggaaggaacgttactgagcgacttgatgagcattttgtctagaatccctcgtgtagtgcttttgatattgaagactaacgacctaaccagacatcttgatgaatgtctacagaatccactcgggccagagaggactttcctgatcatgacgcaatactgcgccaagacggtctacgacgaaaaagtggaaagaattaattcggagtatgcgaggtggtctattaaatggatgtgggagaacttgacaaactggatagtctatgagaggcgtattaatcaattgtatttttatgattttgtgttgtggtggaaaaaatttattccgaagacttggttgtcatcttaaatcgttagcgttctttctacttgtaaatatatacgtaaaattatatataacaattttatatgtgtcattaaacggaagacgttgttgctatcacagtggattgtgttatttgggtatttggaatattacagtgacttcttgcagcgttgttagtttttgccatgttctgcaagtacaaggttgaagatgtggtcgagactttgatagtatccttaaacaacttcatttttttattttgactgggtaacgacctggtgttccttctagtctcaccgctagtggcttcttctttgctgactcttaacttttgcagcgcctctttggtgtcgagtaactcgtgttccagtagaacgttgcgttccagtcgtcggtcactctccaattgtaatgtctctatcttattcctcagttggatattttcattttccaactcatctacctgtatctctaaatctgttatctgtttcttattgcacttattttgttgttggctctcaagaagatcgctttttaactttgatattacttgttccaaatcattttcatattctttcgtggcgccttcaagctcgctcaactgggtctccagtgaggagattatctgtatagctgtttccaaatccaaattcggcaccataggaaagtcgcaattgttgcacgtatatgtcccttggatattccaattaaatttgcgaggattgttctttcggccgttcgtggtttgttgtagcccttattatccctctttttcatccttaattgcaaatttatgtatgaaaactttcatttctaatgttattaattttcccgattctgcaaactaattgataaaataattgatacttgccgtcacagatgatatagagaacgttcagtttttttattgttctattgtaaaaaaaaaaaaaaaaggaagaaaaaagcaagatccgataggagaagacctctttagcggctttactgcgctacaaataaggttacgaatatgcggaatagttcatgatacgttgttgagttatagtatgtagccaatatttcctgtttttccgctgttacccttttcgaaggatcgatgaacgcttctgtcacttagtaagcaaatgtacgaaacccagagcattgtatgtacaccagcagtcgttttttgtagctcttttccatggatggacgatgatggcaagacgcgatcgtggcggagcctcactaagaaaaacaattgtggagaatctatacacacagaaatcgtacttcaagaaatattgattagcgagcctttaagcacagaacaatctctatagccaacatcttgtggaagctacaactgtttttcttgttcccgcttgagtagggccttacaaggcaagaccgtataaaataaagataactcctccgccgtatcctgaatttcgtgtgccctttctctctctctctcttcctctttcttcctttccctttccctcttcttcttatctcaacaaccgcccagcgcattagcaaaccacagtacgagctgtacggctgagccactgcacctgtctggcttgcccctttttgttgagtaaccgggtaataattcggctgtctaaacgatacaatcctcgttccacccacacccattcacccgtcgggcgaaatccaccctcgcggcctcgtttagaataccaggcaacggcaccagcaacggccccggtaactcgatcgcgttcatatatatcggatatactcttgaggcacaatttttttcggttttcggttttttctattattcttcgagatgcaaagcacacatttgagactcacaactcaagataccgcaagcacacagacgctattgttctcccaaagaataggttcctgcagtgctcttttaaggtttgaagatattgcacaaaattgtatctgatttcatctcatcgaacctcattccatcaacttccttttatcaaagcatcttgttttgttttcgcagaaaatttttcttccctttcaatttggccttttagtttttctccagtcgcaggcaagaaggtaaggaaatagaagaaaaagaaaaaaaaaaaaagggaacaataggttagatgtcgaataccccttataattcatctgtgccttccattgcatccatgacccagtcttcggtctcaagaagtcctaacatgcatacagcaactacgcccggtgccaacaccagctctaactctccacccttgcacatgtcttcagattcgtccaagatcaagaggaagcgtaacagaattccgctcagttgcaccatttgtcggaaaaggaaagtcaaatgtgacaaactcagaccacactgccagcagtgcactaaaactggggtagcccatctctgccactacatggaacagacctgggcagaagaggcagagaaagaattgctgaaggacaacgaattaaagaagcttagggagcgcgtaaaatctttagaaaagactctttctaaggtgcactcttctccttcgtctaactccttgaaaagttacaacactcccgagagcagcaacctgtttatgggtagcgatgaacacaccacccttgttaatgcaaatacaggctctgcttcctctgcctcgcatatgcatcagcaacaacagcaacagcagcaacaggaacaacaacaagacttttccagaagtgcgaacgccaacgcgaattcctcgtccctttctatctcaaataaatatgacaacgatgagctggacttaactaaggactttgatcttttgcatatcaaaagtaacggaaccatccacttaggtgccacccactggttgtctatcatgaaaggtgacccgtacctaaaacttttgtggggtcatatcttcgctatgagggaaaagttaaatgaatggtactaccaaaaaaattcgtactctaagctgaagtcaagcaaatgtcccatcaatcacgcgcaagcgccgccttctgccgctgccgccgctaccagaaaatgtcctgttgatcactccgcgttttcgtctggcatggtggccccaaaggaggagactcctcttcctaggaaatgtccagttgaccacaccatgttctcttcgggaatgattcctcccagagaggacacttcgtcccagaagaggtgtcccgttgaccacaccatgtattccgcaggaatgatgccgcccaaggacgagacaccttccccattttccactaaagctatgatagaccataacaagcatacaatgaatccgcctcagtcaaaatgtcctgtggaccatagaaactatatgaaggattatccctctgacatggcaaattcttcttcgaacccggcaagtcgttgccccattgaccattcaagcatgaaaaatacagcggccttaccagcttcaacgcacaataccatcccacaccaccaaccacagtccggatctcatgctcgttcgcatcccgcacaaagcaggaaacatgattcctacatgacagaatctgaagtcctcgcaacactttgtgagatgttgccaccaaagcgcgtcatcgcattattcatcgagaaattcttcaaacatttataccctgccattccaatcttagatgaacagaatttcaaaaatcacgtgaatcaaatgctttcgttgtcttcgatgaatcccacagttaacaactttggtatgagcatgccatcttcatctacactagagaaccaacccataacacaaatcaatcttccaaaactttccgattcttgtaacttaggtattctgataataatcttgagattgacatggctatccataccttctaattcctgcgaagtcgacctgggagaagaaagtggctcatttttagtgcccaacgaatctagcaatatgtctgcatctgcattgacctcgatggctaaagaagaatcacttctgctaaagcatgagacaccggtcgaggcactggagctatgtcaaaaatacttgattaaattcgatgaactttctagtatttccaataacaacgttaatttaaccacggtgcagtttgccattttttacaacttctatatgaaaagtgcctctaatgatttgactaccttgacaaataccaacaacactggcatggccaatcctggtcacgattccgagtctcaccagatcctattgtccaatattactcaaatggcctttagttgtgggttacacagagaccctgataattttcctcaattaaacgctaccattccagcaaccagccaggacgtgtctaacaacgggagcaaaaaggcaaaccctagcaccaatccaactttgaataacaacatgtctgctgccactaccaacagcagtagcagatctggcagtgctgattcaagaagtggttctaaccctgtgaacaagaaggaaaatcaggttagtatcgaaagatttaaacacacttggaggaaaatttggtattacattgttagcatggatgttaaccaatctctttccctggggagccctcgactactaagaaatctgagggatttcagcgatacaaagctaccaagtgcgtcaaggattgattatgttcgcgatatcaaagagttaatcattgtgaagaattttactctttttttccaaattgatttgtgtattattgctgtattaaatcacattttgaatgtttctttagcaagaagcgtgagaaaatttgaactggattcattgattaatttattgaaaaatctgacctatggtactgagaatgtcaatgatgtagtgagctccttgatcaacaaagggttattaccaacttcggaaggtggttctgtagattcaaataatgatgaaatttacggtctaccgaaactacccgatattctaaaccatggtcaacataaccaaaacttgtatgctgatggaagaaatacttctagtagtgatatagataagaaattggaccttcctcacgaatctacaacgagagctctattcttttccaagcatatgacaattagaatgttgctgtacttattgaactacattttgtttactcattatgaaccaatgggcagtgaagatcctggtactaatatcctagctaaggagtacgctcaagaggcattaaattttgccatggatggctacagaaactgcatgattttcttcaacaatatcagaaacaccaattcactattcgattacatgaatgttatcttgtcttacccttgtttggacattggacatcgttctttacaatttatcgtttgtttgatcctgagagctaaatgtggcccattgactggtatgcgtgaatcatcgatcattactaatggtacatcaagtggatttaatagttcggtagaagatgaggacgtcaaagttaaacaagaatcttctgatgaattgaaaaaagacgatttcatgaaagatgtaaatttggattcaggcgattcattagcagagattctaatgtcaagaatgctgctatttcaaaaactaacaaaacaactatcaaagaagtacaactacgctattcgtatgaacaaatccactggattctttgtctctttactagatacaccttcaaagaaatcagactcgaaatcgggtggtagttcattcatgttgggtaattggaaacatccaaaggtttcaaacatgagcggatttcttgctggtgacaaagaccaattacagaaatgccccgtgtaccaagatgcgctggggtttgttagtccaaccggtgctaatgaaggttctgctccgatgcaaggcatgtccttacagggctctactgctaggatgggagggacccagttgccaccaattagatcatacaaacctatcacgtacacaagtagtaatctacgtcgtatgaatgaaacgggtgaggcagaagctaagagaagaagatttaatgatggctatattgataataatagtaacaacgatatacctagaggaatcagcccaaaaccttcaaatgggctatcatcggtgcagccactattatcgtcattttccatgaaccagctaaacgggggtaccattccaacggttccatcgttaaccaacattacttcacaaatgggagctttaccatctttagataggatcaccactaatcaaataaatttgccagacccatctagagatgaagcatttgacaactccatcaagcaaatgacgcctatgacaagtgcattcatgaatgctaatactacaattccaagttcaactttaaacgggaatatgaacatgaatggagctggaactgcgaatacagatacaagtgccaacggcagtgctttatcgacactgacaagcccacaaggctcagacttagcatccaattctgctacacagtataaacctgacttagaagactttttgatgcaaaattctaactttaatgggctaatgataaatccttccagtctggtagaagttgttggtggatacaacgatcctaataaccttggaagaaatgacgcggttgattttctacccgttgataatgttgaaattgatggtgttggaataaaaatcaactatcatctactaactagtatttacgttactagtatattatcatatacggtgttagaagatgacgcaaatgatgagaaatagtcatctaaattagtggaagctgaaacgcaaggattgataatgtaataggatcaatgaatattaacatataaaacgatgataataatatttatagaattgtgtagaattgcagattcccttttatggattcctaaatcctcgaggagaacttctagtatattctgtatacctaatattatagcctttatcaacaatggaatcccaacaattatctcaacacccacacatttctcatggtagcgcctgtgcttcggttacttctaaggaagtccacacaaatcaagatccgttagacgtttcagcttccaaaacagaagaatgtgagaaggcttccactaaggctaactctcaacagacaacaacacctgcttcatcagctgttccagagaacccccatcatgcctctcctcaacctgcttcagtaccacctccacagaatgggccgtacccacagcagtgcatgatgacccaaaaccaagccaatccatctggttggtcattttacggacacccatctatgattccgtatacaccttatcaaatgtcgcctatgtactttccacctgggccacaatcacagtttccgcagtatccatcatcagttggaacgcctctgagcactccatcacctgagtcaggtaatacatttactgattcatcctcagcggactctgatatgacatccactaaaaaatatgtcagaccaccaccaatgttaacctcacctaatgactttccaaattgggttaaaacatacatcaaatttttacaaaactcgaatctcggtggtattattccgacagtaaacggaaaacccgtacgtcagatcactgatgatgaactcaccttcttgtataacacttttcaaatatttgctccctctcaattcctacctacctgggtcaaagacatcctatccgttgattatacggatatcatgaaaattctttccaaaagtattgaaaaaatgcaatctgatacccaagaggcaaacgacattgtgaccctggcaaatttgcaatataatggcagtacacctgcagatgcatttgaaacaaaagtcacaaacattatcgacagactgaacaataatggcattcatatcaataacaaggtcgcatgccaattaattatgagaggtctatctggcgaatataaatttttacgctacacacgtcatcgacatctaaatatgacagtcgctgaactgttcttagatatccatgctatttatgaagaacaacagggatcgagaaacagcaaacctaattacaggagaaatctgagtgatgagaagaatgattctcgcagctatacgaatacaaccaaacccaaagttatagctcggaatcctcaaaaaacaaataattcgaaatcgaaaacagccagggctcacaatgtatccacatctaataactctcccagcacggacaacgattccatcagtaaatcaactactgaaccgattcaattgaacaataagcacgaccttcaccttaggccaggaacttactgaatctacggtaaatcacactaatcattctgatgatgaactccctggacacctccttctcgattcaggagcatcacgaacccttataagatctgctcaccacatacactcagcatcatctaatcctgacataaacgtagttgatgctcaaaaaagaaatataccaattaacgctattggtgacctacaatttcacttccaggacaacaccaaaacatcaataaaggtattgcacactcctaacatagcctatgacttactcagtttgaatgaattggctgcagtagatatcacagcatgctttaccaaaaacgtcttagaacggtctgacggcactgtacttgcacctatcgtaaaatatggagacttttactgggtatctaaaaagtacttgcttccatcaaatatctccgtacccaccatcaataatgtccatacaagtgaaagtacacgcaaatatccttatcctttcattcatcgaatgcttgcgcatgccaatgcacagacaattcgatactcacttaaaaataacaccatcacgtattttaacgaatcagatgtcgactggtctagtgctattgactatcaatgtcctgattgtttaatcggcaaaagcaccaaacacagacatatcaaaggttcacgactaaaataccaaaattcatacgaaccctttcaatacctacatactgacatatttggtccagttcacaacctaccaaatagtgcaccatcctatttcatctcatttactgatgagacaacaaaattccgttgggtttatccattacacgaccgtcgcgaggactctatcctcgatgtttttactacgatactagcttttattaaaaaccagtttcaggccagtgtcttagttatacaaatggaccgtggttctgagtatactaacagaactctccataaattccttgaaaaaaaaatggtataactccatgctatacaaccacagcggattcccgagcacatggagtcgctgaacggctaaaccgtaccttattagatgactgccgtactcaactgcaatgtagtggtttaccgaaccatttatggttctctgcaatcgaattttctactattgtgagaaattcactagcttcacctaaaagcaaaaaatctgcaagacaacatgctggcttggcaggacttgatatcagtactttgttacctttcggtcaacctgttatcgtcaatgatcacaaccctaactccaaaatacatcctcgtggcatcccaggctacgctctacatccgtctcgaaactcttatggatatatcatctatcttccgtccttaaagaagacagtagatacaactaactatgttattcttcagggcaaggaatccagattagatcaattcaattacgacgcactcactttcgatgaagacttaaaccgtttaactgcttcatatcattcgttcattgcgtcaaatgagatccaagaatccaatgatcttaacatagaatctgaccatgacttccaatccgacattgaactacatcctgagcaaccgagaaatgtcctttcaaaagctgtgagtccaaccgattccacacctccgtcaactcatactgaagattcgaaacgtgtttctaaaaccaatattcgcgcacccagagaagttgaccccaacatatctgaatctaatattcttccatcaaagaagagatctagcaccccccaaatttccaatatcgagagtaccggttcgggtggtatgcataaattaaatgttcctttacttgctcccatgtcccaatctaacacacatgagtcgtcgcacgccagtaaatctaaagatttcagacactcagactcgtacagtgaaaatgagactaatcatacaaacgtaccaatatccagtacgggtggtaccaacaacaaaactgttccgcagataagtgaccaagagactgagaaaaggattatacaccgttcaccttcaatcgatgcttctccaccggaaaataattcatcgcacaatattgttcctatcaaaacgccaactactgtttctgaacagaataccgaggaatctatcatcgctgatctcccactccctgatctacctccagaatctcctaccgaattccctgacccatttaaagaactcccaccgataaattctcgtcaaactaattccagtttgggtggtattggtgactctaatgcctatactactatcaacagtaagaaaagatcattagaagataatgaaactgaaattaaggtatcacgagacacatggaatactaagaatatgcgtagtttagaacctccgagatcgaagaaacgaattcacctgattgcagctgtaaaagcagtaaaatcaatcaaaccaatacggacaaccttacgatacgatgaggcaatcacctataataaagatattaaagaaaaagaaaaatatatcgaggcataccacaaagaagtcaatcaactgttgaagatgaaaacttgggacactgacgaatattatgacagaaaagaaatagaccctaaaagagtaataaactcaatgtttatcttcaacaagaaacgtgacggtactcataaagctagatttgttgcaagaggtgatattcagcatcctgacacttacgactcaggcatgcaatccaataccgtacatcactatgcattaatgacatccctgtcacttgcattagacaataactactatattacacaattagacatatcttcggcatatttgtatgcagacatcaaagaagaattatacataagacctccaccacatttaggaatgaatgataagttgatacgtttgaagaaatcactttatggattgaaacaaagtggagcgaactggtacgaaactatcaaatcatacctgatacaacaatgtggtatggaagaagttcgtggatggtcatgcgtatttaaaaacagtcaagtgacaatttgtttattcgtagatgatatggtattgtttagcaaaaatctaaattcaaacaaaagaattatagagaagcttaagatgcaatacgacaccaagattataaatctaggcgaaagtgatgaggaaattcaatatgacatacttggcttagaaatcaaatatcaaagaggtaaatacatgaaattaggtatggaaaactcattaactgagaaaatacccaaattaaacgtacctttgaatccaaaaggaagaaaacttagcgctccaggtcaaccaggtctttatatagaccaggatgaactagaaatagatgaagatgaatacaaagagaaggtacatgaaatgcaaaagttgattggtctagcttcatatgttggatataaatttagatttgacttactatactacatcaacacacttgctcaacatatactattcccctctaggcaagttttagacatgacatatgagttaatacaattcatgtgggacactagagataaacaattaatatggcacaaaaacaaacctaccaagccagataataaactagtcgcaataagcgatgcttcatatggtaaccaaccatattacaagtcacaaattggtaacattttcctactcaacggaaaagtgattggaggaaagtcgacaaaggcttcgttaacatgcacttcaactacagaagcagaaatacacgcagtcagtgaagctataccgctattgaataacctcagtcaccttgtgcaagaacttaacaagaaaccaattattaaaggcttacttactgatagtagatcaacgatcagtataattaagtctacaaatgaagagaaatttagaaacagattttttggcacaaaggcaatgagacttagagatgaagtatcaggtaataatttatacgtatactacatcgagaccaagaagaacattgctgatgtgatgacaaaacctcttccgataaaaacatttaaactattaacaaacaaatggattcattagatctattacattatgggtggtatgttggaataaaaatcaactatcatctactaactagtatttacgttactagtatattatcatatacggtgttagaagatgacgcaaatgatgagaaatagtcatctaaattagtggaagctgaaacgcaaggattgataatgtaataggatcaatgaatattaacatataaaacgatgataataatatttatagaattgtgtagaattgcagattcccttttatggattcctaaatcctcgaggagaacttctagtatattctgtatacctaatattatagcctttatcaacaatggaatcccaacaattatctaattacccacaaatttctcagatggactagtagatttttatagagcagattttccaatatgggagtgatgcggtttgtttatgtataaatagaaagggacatatttttattattattattttagttatttagcatgtatgttattttatcggtgaattgtaatgatcgaataataattggaggttgaagaagttgcaaaaaatatttacttggacgagtccggaatcgaaccggagacctctcccatgctaagggagcgcgctaccgactacgccacacgcccaattttcttgttgtctgttgtgtttcagaatggggtacgtcagtatgataataatcatcctaaacgttcttaaattacatatgaaacaaccttatagcaaaacgaacagaatgagcaacatgagatgaaactccgcctccttaactgaactttccaaacgtataaacgcctgaaaaattagtttagatccgagattccgcgcttccaccatcaagtatgatccatattttatataatatataagataagtaacattccgtaagctgataatcccttttggcaactcgttacttcccaaagactgtttatattaggattgtcaagggaccccggtattgctcgagcccgtaatacaacagttgtctttcactgctctctatgttttgagacctccagttcaccacatatattcgatctttttcttactgttgaagcaagaatctgttggaatgaaggcctagtattgtctattgactaatattcatcttactagtatattatcatatacagtgtaagaagatggcataaagattgagaaccagtcatcagactaatgaaagctgaaatgcaaggactgataatgtaatgggataatgaaatatataaaacggaaggagaaataaccgtgatattattatgtagatttaccgactccacttggaggatttctctattctcgagggaaacttggtatattcgtacacctaatattatagctcttgataacaatgaaatttcaacaattattcactcaaccctcaagtgtatatcgccaagatcctaatcacccctctctggtggccttccctcattgtttttacacagaacaagaatccataaaatcaagatattgggaacaattcattgtcttaggaacaagtttttataatttagtttcattagcctattgtaacttcttgttttttttttttattttggctggcaaaacaagaagtataaagaagttaccactgctataacgtatatcttaaatcaagtgggcaattcttcgaataaacttagaggcgctgaagaaagaaccgctcaattagttcgatcatacaaaatacagatattgcgctgtgtattatcattacggaaagtgtgatataaacaatgctgtgttgtattcggtcttttttttccgcctggagattgtcgtttttgtttttttttctcgtgtagctgcagttatcatcgttttgcatgtctgttctgtcggtgaagccgatctcatggcacttcgctttgataccgtaaagaatcttcttcattaatacggcactgcaaggcgatatctatctctggggttaggactgataaataggtacttatcagttatcactagagacgaactgtttacgttttgaagctcgacagcaggggttcttaacgggcgtcggcctagacctcaccttgcgagaaatttttagttcatatccaggggatggtgaatggttggatctgacgaagccacggtaagggcaaggctttgcgcatgcactggccactatgcataccatatataaatagataatcaagcgtatagaaaacgacatgctaagttattttactcagtgttaggtctcttagtatttgcgtctgaaaagatcttagctctgtctttgactctatcacttatttttaagaggttctctattcgtcagtgatagaaatagcattttgacccgcacgacattggttaataagagtacttttccacgtgtttcgattgcctttatttttagcatacttgaaaataatattatcgtgagatttaggtaaaatataccacatatcaagagaaagagaagtaagaatggttgacgctaggggtagtacgccatgtttaattggtgattctataagaaacgttaatgatggaaatagtctggatttccagtatactaatcagtttaatgaggaaagtgaggcttcgaggttactaacgccacaaacgagttccaatcacgccctaagcaagatgcagaaggatgatgatattcgagatagatcttatacatctgtagcggaattgaatcgtgagggtgctttgctgaccgacgaagttgatttggagaatgttgatgcttcgaaagttcgcagcaatagagacgacctagaggcagaggagaaaaggaaaaaactactcttgttgaaaaaaaagcaaagaaataaatccatcaactcggaaagtttttcctctccttctctgcgtgcttccaaatctaattcactgattacatcaactgatcctgtcgaagatcacatcagtaagtactcttcatcaggcacccctgaaaatattacaggtgaggcagacgacgaagacgaagacataatcagaaactcttacgggcaaatgatcaaaaacaattccaacaggccacatttggcgaagggtgaatcgtaccagtccgcagaacaggaaatagatcatacggcgcctgaaaaatcagagaaaagacaagaaagaagcggtagatcctttgatagacaaaaatcttcggctgagtttctaagatccttatcgaggtcaataagtcgtggacccacaaagaacaaaacggtttcgccctctaagggagaagactctagaatgtatagtaccagcaactactctatatcattagttgatttggagaacggacccaaaattatcccggaaactttagaagaagagcaggaggacgccgaaaaggagggtgttttgatggaagacgagggtaatgaagaatacaccaaagatttggaagaagcagctaacaaagctcaaccacagtagaatggaatattgaaactggagtgacttctgatgaagtttccaattatttatatgtatacattatttatttgtctatcattaaaatttctgtcaagtaatggctttttatgtttatttcatggattacgaaatttgctggctttttagagtgaccgatgagttgcatgtacatatgtgcgaaataaaacaatacggtagtaaaacatgaatacttcgagaagtaaattcaagattgcaggcgtagcacaagaatgtccttccgcctgctagtgtgttgagcaaagcacgccatcactaatggaacccttacaaaatctcgcatggagcagcaaaccttaaatccattttctatcattcgttcctgaggacccggatatcgttttagagacaaaaatagatactacaagaggaatagggatatctgcacatggggcctcgagcatggctcattttcgattttccggcacgatgctgacttagtactatcatgccaggcaggacaggccttatggggttcttgcagcttaccaattctgacactggactgcccctggattagcgaccccgcgaccccgcgaccagactccctgaaaatggtaattggtgatgatatatgtgactgagttcagcctgggcatacaatgtttaacccttttggacatggaattaggccagcaaagggagcagctttccccgaaagcgtagtttttctccaggaacgcaattcacccctttctttcttatgcaagctcctcgtacatatataaaaatatatgagtatatatagtgcttctacagcataatcaatttaaggttccttgcctttccttaaatatgttagctatctctaaagcatcactgagaagtggtagtttttttgataactgtgattgaagttttgactacctcagagaaaaattttgaatgtcccgtgacctacaaaaccatttgttattcgagactgcgactgaggttgctaatagggttggtggtatttactccgtgctaaaatcgaaggctcccattacggttgcccagtataaagaccattaccacttgatagggcccttaaataaagccacttatcaaaatgaagttgatatactagattggaagaagcctgaagccttttccgatgaaatgaggccagtgcagcatgccctgcaaacaatggaatctagaggagttcattttgtttatgggaggtggctgattgaaggtgctccaaaagtaatactttttgacttggattctgtgagaggttattcgaatgaatggaagggtgatttatggtcattagtaggaattccctctcctgagaatgatttcgagacgaatgatgctatcctattggggtatacagtcgcttggtttctaggcgaagtggctcatctcgattcacaacacgcaattgttgcgcactttcacgaatggttggccggtgttgcgttaccattatgccgtaaaaggcgtatcgatgtagttaccattttcaccactcatgctactttattgggacggtatttatgcgcctccggcagtttcgatttttacaattgtttagaatctgttgatgttgatcacgaagctggcagatttggcatataccatcgttattgtatagagagagcggcggctcattctgcagacgtgttcactacggtgtcacaaataactgcttttgaagcggaacatcttttgaaaagaaaaccagatgggattttgcctaatggactgaacgtcatcaaatttcaagcatttcatgagttccaaaatttgcatgctttgaaaaaagaaaaaatcaatgactttgtaagaggccattttcatggttgcttcgatttcgatctagacaacaccttgtacttttttattgctggtagatatgagtataaaaataagggtgctgacatgtttattgaggctctagcgcgtttgaactacagattaaaagtatccggatccaaaaaaactgtggtagcgtttattgtcatgcccgccaaaaataattccttcactgttgaagcattgaagggccaggctgaggtgagggcgttagaaaatactgtacatgaagtgactacttcaattggtaaaagaatattcgatcatgctatcaggtacccccacaatggactgacgacggaattaccaaccgatttgggtgaattactaaagagttcggataaagttatgttaaagagacgtattttggctttgagaaggccggagggacagttacccccaatagttacacacaatatggtcgatgacgctaatgacctgattttaaataaaatcagacaagttcaattgttcaatagcccaagtgatcgtgttaaaatgatcttccatccagaatttttgaacgctaataatccgatccttggtttagattatgatgagttcgttcgtggttgccatttgggtgttttcccttcatactacgagccttggggttacacacctgcagaatgtacagtaatgggtgttccctccatcacgacaaatgtctctggtttcggtgcctatatggaagacttgatcgaaaccaaccaagcgaaagattacggtatttatattgtggatcgtcgtttcaaggcacctgatgaatctgtggaacaattagttgactacatggaagaatttgtaaaaaagacaagaaggcaaagaattaatcaaagaaatagaactgaaagactctccgacttactggactggaagagaatgggtctcgaatacgtcaaggcaaggcagttagcattaagaagaggctatcctgatcagttcagagagctcgttggtgaagaactaaatgattccaacatggatgctttagcaggcggaaagaaattgaaagttgcaagaccgcttagtgtacctggctcaccaagagatttgagatcaaacagcacagtctacatgacccctggtgatttgggtactctgcaggaggttaataacgcggacgattatttttcattgggagtgaatcctgcagctgacgatgacgacgatggcccatatgctgatgacagttaaatcctatgaggatataaacagtattaaaaaaatcttaccataaagacatacgacatttcgaggcgtttttgcttttcttttaactttcgttggcacaaactgaaatatatgtggaatgccctctgaaaatatactaggagttttgagcgatccaaacattttcttttctttttttctcttccttctagcgaagtcctcttgcgttagctgtaaacaaaataagtcaatttcattaatgaaaagtgacattatggcggtagctctctctatctttgttcagttatcaacatatagtcatacttaaagatataatagctcatagtcatatatagttctttatacttgaaaaagtgattcctaaaaatctcaacttttttcacattgtatttacaagataataaaattattaccatatttaaacgaaagataaattttgaattaaggcggtcgttacatcatacctggcattcctggcataccacctggcataccaccagcgccagcagctgctggtggttctggggcatcaacaatagcaacttcggtagtagctaatagtgaggcaacaccagaagcatcaactaaaccggatctaaccactttaaatggatcgatgataccagtggctaacatgtcggtgtattctgacttagaggcatcgtaacccttggcaaaatcatcaccatattcatcaatcaatttgccgatgataactgaaccttcttcaccagcgttttcaatgatctgcttggctggtcttgtaatggcctttcttatgatatcgacacccaatttttgatcgaaattgtcgacaacaacttcatccaaaactctagatgccttcactaaggcagtaccaccacctggcaagataccttcctcaactgcagctctggtagcgttcaaagcatcatcgtaacggtccttcttttcaccaacttcaacttcagatgcaccaccgaccctgatgacagcaacacccccggacaatttggccaaacgctcttgcagtttctccttctcatatgaatttgtggtggtaatgtcgatggagcctttgatttgttcaattctctcttgaatagcttcctttggaccactaccgttcaggataacggtgtcttccttagtaacggtaatagagtcacaagaacccaagttttctatggtacattgttctggtttcaaatccaactcctcagtaaaaacagtaccgcccgtcaagactgcaatatcaccaattgtattctttctattatcaccgaaaccaggcgccttcacagcacaaaccttaacttgacccctcaacttgttcaaaatacaagccgcaagagcttcaccgtcaacatcttcagcaatgatcaacaaaggtcttctgctttgattggaaatttccaaagctggcaagatatcttgaatggaagaaattttcttttcactcaacaatagcaatggcttttcaaattccaccttgctcgactttggatcagtgatgaagtatggagaaataaaaccacgatcaaacctcataccttcagtaacctcaagttcatcttccaatgttctaccttctctgatagtgatgacaccttcttttccaaccttttccatagctgaagctagtaacttaccaacatgagagtccccattggcagaaatggttgctacttgagcaatttcctcagatgtggtaatttctttcttgttggcgctcaaaaattcaatcactttttcaactgcaacttgagaaccccttctcaaatccatagggttacaaccagcggcgacatttttgacggattctgtgaagatggctctacctaagacagtagcagaagtagtaccgtcaccagcagcctcattggttttggaggcaacttcttgtagtaacttggcacccatattttcaaacttgtccttcaacacaatagatttggcaactgtaacaccatccttagtaatctttggaggaccgaaaggctgttcgattaaaacgtttctaccctttggacccaaagtagcagcaaccgcttcagctaaagtttcgacacccttaagaagggaggctcttccttctacaccgaatttcaattctttatgagaggagtaagcacgacgcaataaaggccttaaagtagcgcgactacgaacaacggatgatctcaacattttgaaaacttttttgcttatgatgttttctcgtgggaattttcttatattattcaaggaagtgcatgaagacgcaaccacgaccttacataatgaatgtaaaacttagtctccttcaatatatatacatgaatgtccgtctggattctgctccgggcaaaacgaagcaaaattaaagtcaccctccccatttggttttctggaaaattccacgaggtccgtatatgatgacatatacagatgggcggctataaagtaagtttccagaggtaataccaggcaataaacagcttcaattgctcgtaacaccattgtatacctacaaaaacagtggaatagggatgagacataactggctggaatttcaactgtacttctttgcacaactagtcttggcgttctacttgatcattgcgcgaatggatgcactcgcaataattcccaatagtataacaggaggaacatttggatgcattaggtatattattcatcttctttatcatcaaaattttctcttcctttatgttactatgttgctttcttttaatctatgtttttttccctttcagttgccaccgcttttctgcaagattcatagttagatttgcaaatcaaggtgttttcgggccttgttaaagccttcgcaggcgaagaagaaagggaacgtaagctgcgtgagccgaatctatttatacaaaaacaatcaaaaaagtataactacagcataaactgttgtatatacgtgttgcaaaataggaaagaaaagaagagtaaaaggactcttgatattatctcgaaaaaaccacaaatagtgtaagatttaaacagtaagccaaaagagatgactttgaaaccttcaaagagacgtaagggcaggtctcgccattccaggaagaagcaaataacgtcagcgatactgactgaggaaggaataatgatcaaggcaaaaccatcaagtccttacacatacgcaaatagaatggcagataaacgaagtcgcagcagcattgacaacatcagtagaactagctttcaaagcaacatcagtagaactagctttcaaagcaacagtgataacaacagtatatttgaaacggcttcactaattagctgtgttacctgtttaagcgatactgatacaatagacagatcggaaacatcgacaacggatacaagtaaagatgatctttctgctaatccaaaacttcattatccttcggtgaatggtcaattgccagcaaacaccgttatcccctatggacgaattctggatgccagatacattgaaaaggaacctctgcattattatgatgccaattcatcacccagttcacctttaagcagctcaatgagtaacattagtgaaaagtgtgatcttgatgaattagagtcttcccaaaaaaaagaaaggaagggcaactcgctatcgcgaggaagtaacagtagtagtagcctcctgacttccagatctccttttacgaaactagtagaggttatatttgctaggccaagacggcatgacgttgtacccaaaagggtttcattgtatattgactataaaccccattcatcttctcacttaaaagaagaagatgacttggttgaggagattttaaagagaagctacaaaaacactagaaggaacaaatccatatttgtgatcattaatccgtttggtggtaaaggtaaggcgaaaaaactgtttatgacaaaggcaaagccgttactattagcaagtcggtgttccatagaagtggtttatacaaaataccctggtcatgctatagagatcgcgcgggaaatggatattgacaaatatgacactattgcttgcgcttcgggagatggcattcctcatgaggtgatcaatgggttataccaaaggcctgatcatgtcaaagcattcaacaatatcgccattacagaaattccatgcggatcaggtaacgcaatgagcgtatcctgccactggacaaacaatccttcgtactcaactttatgcttaattaaatcgatagagactagaattgatttgatgtgttgttcgcagccttcttatgcaagagagcacccaaagttatcatttttaagtcaaacatatggtctcattgcagaaactgacataaacactgaatttattagatggatgggacctgcaaggtttgaattgggtgtagccttcaatatcatacaaaaaaaaaaatatccttgtgagatatatgtaaagtatgctgccaaatcaaaaaacgagttaaaaaatcattacctggaacacaaaaataaagggtcgttagaattccagcatattactatgaacaaagataacgaggattgtgataattacaattacgaaaatgaatacgaaaccgaaaacgaagatgaagatgaagatgcggatgcggatgacgaagactcccacttgatatctcgtgatctggcagattctagtgctgatcaaattaaagaggaagatttcaaaataaaatatccattagatgaaggtatccctagtgactgggaaagattggatcctaatatttcgaacaacctaggtatcttctatacgggtaaaatgccatatgtggctgctgacactaaattctttccggcagcgcttccttcagatggtacaatggatatggttatcaccgatgcaagaacctcgttgacgaggatggcaccaatcctgctgggactagataagggttcccatgttttacaaccggaagtcttacactctaaaattttggcatacaagataataccaaagctagggaacggcttgttctctgtcgatggcgagaaatttcctctagagccccttcaagtcgaaattatgccacgcttatgcaagacgttactgagaaatggccgttatgtggacacagatttcgattctatgtgacactttacttaatcttttccttcgtactgaacaattaatcaaaaactagaatatgtcatttctatttcttctatattttttttacgttgttgttgtttttgttgttgtttgataactttatacactccatacttctttataaaaagttttaataccattctttaatacaaccatgtttagtgagtactagctcctacacatcagatcgtcaagtacattatgattatgattattattaatattatcagtacaattattatgtgctggtagttcactaaaaaatatgacgcacacaaagagttctccttatgccctatagaactgaaatattaggtgctaacactgacaagcgctttgttcctgctcctctgctgtagaaatatcaatgactcccggtttattttggtttgcactatttgcattttcgctatccaaaggagttgactcgctgttttgaaattcaggcagcgatttggcaatctttttgaataaagctttgacattatagcctgcctttgtggacgtttccataaagattttagcacccaatagttttgcttttttctctccctcttcggttgagatttgcctttcatctgataaatcacttttgttaccaacaatgcacaatataacattttcgtcacctctttcatttttaacgtcttctatccatttatcaatatattcaaatgattttctcttcgtaatgtcgtaaacgataatagcaactctcgaatctctgatatatgaaggtattaatgatctaaatctttcctgacctgctgtatcccataactgtaatctaattgtcttatcatccaaatacatggtcttggaaagaaaatctataccaatcgtggcttggtaatgatcatcgaacgtatcatacataaatctagtgatcagcgatgtttttccaacaccctgttctcccaaaaaaacaattttgtactttgtcaatgatttcccggatctgctcattgttaatctcttctttgtttatcttttactgttcagaatcaacagcttcaaacacttcttttcacacaaccttaagtgcccaattgtgatattcttacatcatacatagtaacaatctatatatgggcaatattttcctccactaattgagctgtgctgaaggctttattacccggaaattattcggccatttttcactagaagttaataccagcactaacgaatagaagcaccctattctactcaagatgcccggttcatgaatagggagaagtatttttcttattttccttagccatctataaatatttatccttatgcctgtcaccacaatagaaaagggtccattatatatcagttgttttcgtacctctagagagacacgcaaggggctttatttaggaaacctccaaatttgctagatgtaaccattatacatagtaattacgattgtaaaacatcggaaagaacgatatatcttgcaaatagcttttctttggtaatatatgtatttacttaaaaaacgagaactagaaaatactgagtaaatttttattagacgttgttaaaggccttttatttcttaccagattttttgataccaccacccactaaaggtttaccacttttcatattagccatcaaagctttcttagcagcagcatcggccttttgcttctctttgaaggcaatgtcttcaggatctaagtcctgttgttgcttcttcttttgctttagaggcttcatcttaccaccttggcgactagacatgattgcttagggtttttcagttattcttctggttttgcaacttactgtgcgtggaagagcaatcaattacaggattttaaacatgaaattttttattttcctcgttcattttcgtcgcgggaaacttccagaagtatagatttactacaatttttatctcaggacagaaagaataaaccaaaaaagccaagacaagccaagccaagccgaggcgactggaggagcttttcatcacattcaatgacaaatcacaacaggtttccctgttagaaaaggcatgtgcactcacaattcatattttcatacagaagatatacattggatttctggagatatcaggtaaggttcgacaaaaacaatggcgtttgccaaccctttatgatgggtgatcttgtatccgcttaattgtgtgatctaaaaaggcaaagtaacgtattattggctggtttatataatttgaatatgactactttttcaacgttaaaaacgataaatacttgctcaaagggttcagcggctaaataaactacgatttcgcagcaggatcagatggattcaatcacatcattcgcaaaacattcacatcattcgtgaagcattaaaggtaataagaaaaatagaacaaagattttttaatcagtgaggaccacaaagggacagcaaatacggtgataagaatggaaggtttgaagaaaaagatttttggtgtttgcctgaaaaatgacttagcacagactaggaatgaaacgaaaggaatccactatgggttaatgactttggaaacttctaaacaactgcaggaatttctccatttgctagtaataaagagagaagtaattcaaaattttgagttgttatttcacatcataaatgttgccgttaaaatcaccgattcaaatcttccaagtgatgatatctggcatttcattttaaaattaagattttcttctgagattaatatagacgaagactccaaagttttaaattatttacttgagactggcatcgcaatggaaaatccagtcagttggaaatgcttggccgttattagcagcatcctcagcagtgtccctcaatccaaaaagattataactaacctgatcgagacagaacatgccaaaaagattggtcagttgtttgataatattcaagatttgcaacaaggaaattttctggtggaaattctctctaactgttttaaaaaaagtgcttcaaattccaagaaagtggaaaaaatacctcagttatggcaaagcaggtctaagaacaagtttttctttgaaaatgaattttacccttttagcagcaaaaatgggagcttacaaacctgccaattcctgtgcaataatttcatgtcaactttatcctttacgggtattctaaggcaggtttcttatagcggatctgaaacattaaaaaatctccgtatatttaagaaaaaagacgatgaaaattcttacttcattcagtgcatttacaacaaaatctatctttggttagacgaaaaagcccctttggaatttgaaagaaagaaaatcaggattaccaaaaacttaaaaaataaaattcaaattaaattgaggcaacctttccatgaatgtgtgagaactaccgctgataaaacagcactcttatttaacaaaacgaaggggtttcagctggaatttgaagacgagaaattaggtgaaactttttttcacaatgtcaacaatatacctaagattagtgaagtacaaaactttttagttttagactatattgaagaagaaccagagaatgaaggtgaagaagaagagcaaatcggaagggcagatgagcagaaagaggatgaagaggaagaatctctcgatgaattatccactcccatggtatatccaataaaatcatctattccccataatcataacgaaaaggttcagttagtcactcccgaccgttctgtttccataagatctgatgaatgggatttaaagtcaaatactgaagacgaagaaggtaatgttcttgcagacctgaaaataagcagcactaaggaaacaaaaaggcaaacagactacgtccatattgattcagaagaccagtcaccagtagtatccgctcagatgagaaaaatgagaagagaatctacgaaaacactagaaatattgagacaagagtttaaagataaggatgtacaaaacaaagaagaccagtccgaacaaatacaaaacccgtttgtaaatacatcctcgttagttgtaggtaaatcctgtcttgttaatcctaaggaaaagcctaatattgatcaaacggtagtcggaataaccgaattaaagtcaaattcttccattaagaaaagggatatcaacattctcgacactatatttgggcaacctccgtccaagaagcaaaaacaattccacaaaaaggagaaaaagaagcagcagaaaaagttgacaaactttaagcccattatcgatgtcccttcccaagataaacgaaaccttaggtcaaacgctccgacaaaacccaaatccataaaagtaagtaagctgcgtaccgataagaaagttacaggggaaaaatcaagcccagaaacagcggcagagaaagttgatgatcaaactgtgcgtagcaacgatgaacaagcaatgagcagagcaactaaagaaaagtgctttccagatgtcaatgaaggcaaagaaattactaaggatgacgctaaagtatctctcgagtccaaaaaaaacaacgaaacttttgttgattcaagtgtagtagaaaaacatacccccccagacaaagactgtaacaattgtaacattacagatattttggaatctaccactgttatcgacttgcagtcaccccatggattatctgctcctggtcagaatactttcacaaacaaacttcaagaacaaatttatagttcaataaatcatttttctaacgaattggtaagaaaaatttcgataataaaccaagagttaaataagaaaatcttaaaagagttgtccgaaaaataccaaaaactattctccgaattacaagataatttccagaatgataccaatgagatgcttaaattcatgggcgagatcaaagacatgatgaatctcccggaagatcagctcgttcatgctattaggacaagaaaatttgataacaacaagagataaatagtatacatatacgcaattctttttagatttaagatggctaataaaagtaatataggcaagcttattcatgttcgaatcttttttttctcgcagagctagtactctggcaatcgacacttatttcgtacaaaatgatcacgcaacttttgacaattttttttttttcatctgttttccaggaaacttggatcttttttgctccatagcacttttggtcttcctcaattaaatatttctagatcccggtagttcttcttctttgatcattaataaaaaataagcaaagcataaaagagcagcaaaaatggattctaagaccccagtcaccttagctaaagtcatcaaagttttaggccgtaccggttctcgtggtggtgttacccaagttcgtgttgagttcttggaagacacttcccgtaccattgtcagaaatgtcaagggtccagttagagaaaacgacattttggtcttgatggaatctgaacgtgaagctcgtcgtttgcgttaaaggtatattaaaaaatttactattggtgctcttcgagcattgttttttttctatatttacaaacaacagcttattttttaatatttctcaaaaaatgaagttcgaatgattattttaattgagtttagtgatgaaatcgattgcaaataatataaacgttggtaagctcatctaaacaatcgaaaggagggatagaagacagtaggtgtttgtgctttggtcggtttttccattcggtgaattcatacatctcctttattaattttaatggattctttacaagggattttcggttgccaaaaacagagaacaaatgcgtagaaatactcaatgatgtcaatttttcaaaaaatgaattaaatgattgaagtcacttaatttttgtggttttttggaggtgggttgagtgtacaactcactataattgatgagatattcgacgaacttgttacttttttggattccagaatgtttactgaattttaagaattaattaatttgaggctaacctgtatggcatggaataacgaatcgacaagaagtctcttactgtaactttctttttttttggtgcatctatcgttaaatacaatttaaatattacattcatgtacttactcaatataataatctgattacttcatacaatagaagagaaagaaacagtctctaaaactgctgtcataacgcgtggtgttgtggttttgcttaatttttttagacccatgcaccagatattgatccaatttttttttgtggctcttttgccaatcgctcttattaagtaagtttacatccgcggttatgttttgcgtctaaatttcatttacagtgatggcgagcttgcgcggctattttttatgcagtttatcatttagacactcagaagctgcagtgatgtaagatactgcttgaaactaccgttagattaataataaacaattagaactgtcctaatacatataaacttatatgctccctatcaatggcataacgttaccattcaataaattaacattatcaatgcgtcaacaaaggaatagaactatttgaaaggtccaaccttaatttttgacgtttaattgacttgccttagttttttattctcacctttccaaattttctttttttctgtgggtattcttcgaccaaagaagaacttgattttgttttttctggtgtagcctcagattcagaaaaattctccaggcgaagttgcgaactggtactactttctctagattttggcttgaaatctgtctttggtttaattttaccgcggctatttggtcgagcctcatttgtagggtctgcttgcaattcaaaatcatcattataaaaatgattcaccgcaggaaatctgacgcgctcttttttgttaagttctccagattcttcaaaccgcgacacatcttgaaatttgtttcttaaagataataatgtttttaatgagtccgccagaaattcttgatgctggaattttcctttatgtagtaattttttgattatgtcatcgtctgtgcattgctgcagagattcataattcttagaattttcaggagcccattgactgataactttactcccaccgtctaaatcacgaagagaaattaaaagaaaatctaagcatttttgcttttcattcaaaatatcccgttgtacatagtggtattgggtggaaaggtttaccaattttaataaaagcatgcataaactttgcaaaatcatatagaacatatccttagtaacatgtgaaggtacgctatttatggaaactgtaatatccgcagatacatcgaaactaaaaaccaaatttgaatctaccaatccaatttggttaatttcttgaggagcttgtagaatgtccattagttttagtttaattagatttaatgatatactatccgtaaaaccttggctctggcattgctgtgataattgagtttgtgaaagtttgaaaacgtagggaactaagcgctccaaggaaactaaaacaatcattacaattgtggttggagatgacatcggtagaaataataggagacaatttccctcaccattaatttttttaacacaccattctgcatcacttagctgctgccctttcaactcagaatccatcacacatgtgtaagattaacctcctatctggccgttgttatggttattctccatagggtttccacttatatgacactattttgtgtttgcccgctgccaacactatcatccctttttgggacgaaaaaatccatgtaaaaaaatacatcaatcataaatacatttataaatcgaaatgatattgtttataaaatttctttttgtcaatggaccaaaggtctttggaaatctctttgaacgttttccaaacatcattaataaaatcttcaatcatgagatcactgaagtgctccatattaatgccctttttcagccaaattttttcagtctctattcttgcttgggacgctttatcgaataaaaccctacttacgcgttcaaacgccaaagttgaagttaactgataaaaattggaaactgcttttaacaatcgcttatttctttcattaacagcaaatatgctatcaataatttcgtaaaatcttattattgttcctgaaaatgacagaaatttatcagtcctaacatcgaatcctgtcaaaagttcatcaaagttttcttcttcatatttaatgaattgtatttttttcccagtgtcaaggtcaataaggaaaaggaatgccttctccctgaagattaacctattaaatgctaaactgtacacttgcgatactattcgtattaaaagtggattgattagaataatagacagttttagcccttcagttaacacgttctcctggtcgttgataggctctttaaaatgaaataccattgtattaacacagactgatatggatatcaacaagaactgaaccattctgttcttatctatgattctgctttgttgagcgatgatcatctcaatattgtatatactagcaactatacttagagatcttgataaaatcaatatatcaaagggatcaatatcagagtagtaaactgaatttgtataatgttcgataggtgaaaagttagattgtataaattcaatcaatctcaatgaaaaagtggtcaatttttcgttcatctctctcttgtgaatttcacgagtagtgaatcgggaaacatctaaaaaatcgtgcattagcttaactctcctaaagtcaatactcggtgattggaaattctgcgcagtaaatatacttaagtccaaaagatcatctgaaatagacggaggattacctatatcatatgaggtggatacatcaaggaataaagcccaaaaccaaatacacctcaagttttgtttggtttcctcactttcgttcaaataccatttatcaatatcatttaaacccaaacttatgcacccctggcatagctcgttgattaagtcaacgccttgagtcgcatcccatacaccgtccgtgcaatttatcattacactaatataggacaataagaaaaattgtagtttttccacgaaatttgagctcgatgatgacaaggacgctgcacttaaagtgtgaaggaaatgactcacggaagaagggatatcttggttataatagcccaagcaaagaatttgaagtacaatgccaagattatacttatcttttgcattaccttgcaaatcgaggaggatgactaggttcttgtccgtggtatctctaataaaaagtctgtccaagagggacagaatatcgtcttggttgaagatatgcaatatgccgaacagcggtccagcaaaaaaagatttaatacagctttccatttgaggaaaactaggcaaatctgctacaacatcattttcatttaattgcgatttagtgcattcaggaagtggtttcaagactttccataaattttgaaactcagtttgaaacttattttgttcaaacaaagataaagttttccaggaagtggggccaaacacatacctcgagccattatcacctaaaaccgaagttctcagtgaccgtaatggattttctgaactcctgcaatacaccggtttcgcattattgttatcgttttccttcagtagagtctgcaaattctcaatcttctgaaccaacgctacattgggcacttgctcgaacagttccgtattagacaagggatagttgaactcttctgtgtaaacgcattgcggtagttttctaattacacattgctgacacataggcctggcctgactgcatttcagttttctttttctacaaaatgcacatgacttgatgaccttcctcctcttgcccttcttaccacttgaaacgggctctccggtagtagatttcataggaaaatgggatccatccatcccaacaaactaagtgccgtttgcctctttcttattcgtcccgtaccaaccacgtgttttccacctgtcatgggcttttcaagagtttgtcaacgcggaaaggcgccgcattgcaccttgtcgtgatgtattctaagtacaagtagtaaagaagtaatgaccctgttgttattgctccactgctgaccgctgttaatgcctcttcatgatttctgagtcattgttgtaccctctggcgaataagccactgttggttttgtgtgcatgttggaaaggcgttgcaacggactgtaactccacacacgaaagaacccttaattttcagccgctcgttattttattcagttgatcatttcttgtataaatagatttaagcaaatttaaagttgatgattctatcttcacagctagagctctacgtgaaatttgtgcaatatataggctgtgatttcgaaagttatatattctccgggtagaagtgaaaaggatggttgccgctttaacgtatttgcctactgagcttatccaaaggatatttgagttcactgtggtggaaacagactctcaatattggttgtacaatttagtggctctaattgatttttctgtctcttcgagaggtggtggctctataacggaagacttcttgacaaattacgttaggaagaatttgatggttttagatctgacctgtgaggccacgcaagactcgattttacgagcggagtacgggtttctgaagagattgttgccatacattgacatggacgcacaatatatcagagttgttgatttggaaaccaatgctgacaaggcccagaatttaaaagcagaaaaacttattgttatatttgacgaattctcagatttgaaactcatagaaaccttcttccccttggcgaattccaattcaaacataatcgagttcgtattctgtgttcgcaatataaagagttcgttttattcacctttggaaaaattacatattgcgaacatagtcgcagatattgatattaacacattgtatctggacttcgtggattcaaatatctattcggatcaaaatttctttgggatttttgatcccgatatttttcagctgattaataaaaactatagaaacttcttttctaagactaacgaaaaggggaagaaaagaccccccatttgcaagaaaatctgttttccctttgttgaaacattgaatttggattatatggcccttgattcattctttaattcgatactgcataaactaacaacaaagataaaaacatttgaaaggaacaatgagtttgacgtggataaaaatttaaatttaaactcgacaacgacagtagcagctttaattatcaagtcgatcttgcaacaattcttcaacaattttcatatcagcttccctaatttggttaccttgaattttattaagatgtctacctacccaaacaataatgagattacccaatgttgtaacttcatagatttatcttcatatgttctaaacaaatgtttaagtgagaatatctcgataaatttcctctttcagttgcactctttgaaaaattggtcaatgcccaagattaaagaattcactgggcacaaattcaagtatgacgaaacaacattttcaggttcaccagaaaggtacatcaaatcattgaggggaaacattaaaattttgcaagaaatggcaattaacgaaaccaacgatggtacttgctatttcagagtcaagttgatacctgagggggtagaaaaaactcaaataatcaactggatcccctttacttcttcatttagcgatgataccttcaaacaaagacaccatttaaagaggccaatgatttgcttgaagaacaactctttaagatcgctcactgtcaaaatcatacgtattgaaaaatgttcatccatccgaatccagggattttacctaccaaatctgcaggaactgttcatcaacaataccctttgcgacaccacccaacaccaaaaacaagcgtcaaatgatatgagttgtatagagttcacttcatggaatgaactaccacaatgcaagaaattgggatttgctcaattagaggacgactctaactacgttcttaatatcagtaacctacaagaccatttaccaaatctggacctgcgggagagtttcccaactttcttcgatataagacagaagtttgtcgtggtttgaggtctaattttcaaccaaacgtgttgtactagcatatataattaaataaatttctctagttatcacttgatttatctaataagagacgtcataaacgaatttttttttagcaataaatcctcaacgctttttgttttcatttttcggtctttttctaccatagaagataaacaagtagagcccatgtaatataatatatctacaacctattattacccaaaaccaacaaaaaccctgacagtgacaccccgttacacactcacaattaagtagggatgataaagtcaacactaatctacagagaagatgggctgcctctttgtacgtctgtggacaacgaaaatgatccctcattatttgaacaaaagcaaaaggtgaaaatcgtcgtttccagattgacaccacagtctgccacggaggctactttggaaagtggctcctttgagatccattatttgaagaaatccatggtgtactacttcgtcatttgcgaatctggatacccaagaaacttagcattctcataccttaacgatatagcgcaagaatttgaacactcatttgctaatgagtaccccaagcctaccgtaagaccataccagtttgtaaactttgataactttctacagatgacaaaaaagtcatacagtgataagaaagttcaggacaatttggaccaactaaaccaagagcttgtaggtgtcaagcaaatcatgtccaagaacatcgaagacctactttacaggggagattctctcgataaaatgagtgacatgagttcttctttgaaagaaacatccaaaaggtacagaaagtccgcgcaaaagatcaacttcgatctcttgatcagtcaatatgctcctattgtcattgtcgctttctttttcgtctttctcttctggtggatcttcctcaaatagacgtcaccccatcatcccacatcacaaatcccgatcaatttggtccaagtgtataacatagtctagttcagtattagtatagtatggcaatttatttgacataattacgtatttttcaggcaagctggcaggtgacccgccgcacctgcactttttagggagtcttttcaaggatatcatcactatatatcgaaggaaaagaggctttccaactcttttggatgatcgaattgccatcactactctattaactgtctgtgtattaactaaataatcacatagtattaagttataattcctggaaaaaaaaagaaagcgaaacgacaaaattagcatataccatgtctcaactgccaacagattttgcttcattgatcaagagattccaatttgttagtgtcctcgattccaaccctcaaaccaaagttatgtccttattgggaaccattgacaacaaggatgctattatcacggctgaaaagacgcactttctatttgacgaaaccgtgagaagaccctctcaagatggccgctccactccagttttatataattgtgaaaacgaatattcttgcatcaacggaattcaggaattaaaggagattacttccaatgatatttactactggggtttgtcagtgataaagcaggatatggagtcgaaccctaccgccaagttgaatttaatttggcctgctactccaattcatatcaagaaatatgaacaacaaaactttcatttagtcagagagactcctgagatgtacaagagaattgttcagccttacatcgaagaaatgtgtaataacggtagacttaaatgggtaaacaacattctttatgaaggcgctgagtcagaaagggtcgtttataaagatttttctgaggagaataaggacgacggcttcctaattttacctgatatgaaatgggatggcatgaacttagactctttatatctagttgcgatcgtctacaggaccgatatcaagacaataagggatttaagatattctgacagacagtggttaatcaacttgaacaacaagattagatccattgttcctggttgttacaactatgctgtccatccggatgagttgagaattttggttcactaccaaccttcttattatcatttccacattcacatcgttaacataaagcatcccggtttaggtaatagtattgccgcgggcaaggccatcttgttggaagacatcattgaaatgttaaattatctaggaccagaaggctacatgaacaagacaatcacctacgctattggtgaaaatcatgatttgtggaaaaggggtctggaagaagaactcactaaacaattggaaagagatggtatcccaaaaatacccaagattgtgaacggttttaaataaaggttgttaaaattctcacatcatccacctttttcctactctcattttctttttttgaaagttgtttgttttatataccttagtttcacaacaacataaggcatgcctatttgagattttgtgattaaaaaataatagaatacgtactatataaccgtcggtttaaagtaaataaattaaagactaagaatgaaacaattaaaaacactgttcaataacgttgctctatcctcctgagtcttccggatcctgtctccatttttttgtgtggtgacgagttgagataaaaagatttccactgctgagaataatatctataatcgataatgaaagttagaacgatcacgttgactctgaaatatagtcaatagaaaaaattaggtatcaattcaattgtaatatttactggattgaatttaatttaagaattacagaataagaggacggacaataagaggtacgctacacatctaccatcactttcagggagggcataaaatggaggagagtaagacaaaaagaaaagaggatcgcatagatttgaagaatacaccgcctcagaagaagtcaaaaagagattcaacaaatgacgaaactgcacgcacatcactacgttcaatcatgcccaggggttataaaatgatggaaaacatgggttacaaagaaggagaaacattaggtagtaatgaaagtgccctaaaagagcctattaaggtagaaatcaatacaaaaaggaggggaattcgtgcagaaaagcccgacccatcaacaatgaatgacatgcagatgagtgaacaacgatttataaaaagagaaagtgaaatgaaaaataataagcggttaaaaaaaatttggtataggatccaaaaagttgcttttgaaatgatgggtgattccgatttatacaatccaggcgaagatccgagagactttaacgtactttggagatcttacgttatgcaactaaatgaggaagtagcaaaaaatgacctaaataatcacagtaacaatgataatgaagataagaataatatgataccaatggtaaatgaaagtttggaggcttcgcctgcaataaaaggtgaaaagtttggacgtccttctacattaatagattgtgatacttcaattatcggtagtcgcattacaaaagacacagaacttgctgaattagaagaattgagcattgaaaaaagaataacaaaattgaatatattcctgaggtccgagaagtactactgttttttttgcggaatcaagtataaggatgaaggtgatctctacgagcattgcccaggagtgaatgaagacgaccacaaatgaattttatcgagataggtaaagtcatatttcaagaagaaagaaatgaacagcttttatttatataataacatataatataaaacggaagaaacgggtaaacgtcagttcgattattcttttgcggatacaaccttgaaaccttgctccaataatgcagtgacgtcttcatttttgtatggtagattgtttagtacgaatgcaatatcatcccattgcttttgggtctcgcactttctcagtcttccaactaatttctcgtttaattgcttttggtgccgttccttatcgataaaagttaacagaaatttgatgattttcttgaaactctccttacccaataaatcatctgacgataaattactaaagatatcgatgaatccattataaatggcgttgtccttggatgctaactcggtgaaaaataatctgcacatatcacttattccctggtctggattgtctaggcatttggccatttctcctaattgtcctttaaccttaacctgtccagctaaaatcaagaaggtaactgtcattaaacatgttctttgtaccattaagttttcatcatgcaaacggcgatacaaataatctgtgttttcgtctactaagttgttgaagcatactgccatgtcacctagtcctaagacagcatttgagcgaatagtaggatcaggagatttttccattactgtgattaatagcggcaggctcttttcacaatattttgatgataaacacattagtttttctagacataaggttgccgttctttgaagcattggatcgctaaacctgcttgaattagaaacaatctcttctacaattgggcaaaacttccctaatatagatttttctccaaatagtaattcattctcttttacaaattgaatagcatccgtgaaatcgtcctcattagtacctcctatcatttctagctctttatcaccaccgttatcttgtgtggtgttagttacatctgcaccttggttttttactttaccgttccgagtttctgcctcgatctttcttttcttgaattctgcctcacatttctctagatagacaagtgttttaattgccacttgtcctacaatgaataataattgactgagagaaacaactctagatgattgttctaacgacaaaatagagtcttcctcttcaggtttaccaaatgtcatcattgtcttttctctaatcagatctgtagctagtatatcgggcttagaagagattgtaaacagtgcactaagcgcttgttcgcacataggataatattcattatccttggtatagttgataattatggcatacaactttttcactgcaacatcttcaagctcttgatttattgccttggtaataatagtgcttctcttgggaaccattctctctaacgctaaacaagaataccgacaaagggtcagatcttttaaaccaacggcaccaagtccaatgtttaaaagtgactccagtccttttaatgctatttcgttatcggctaacgataacattcctaaaataataatagaaccatgaatttgttccttagaaaaccctttttcggagtcacggttgttcacattttgttctttctgcatactggccttcgatgcagaattgtaaatagcccaaaggatattaatgacatgttgatcaatcaatttttgttcatacatcattcctaatagctgttccaaagaggccaagtctgcaatagatgcgccgatgcttagattaattaaatttttggcaatatgtgccgccttctcctgcatattgcaactatctggcgcggttaaaaatagctgcttataacattctatcaaatgtactgatatactcgttccttcatcgtttgtgcccttcatccaaaccaaatgcagcattttttttataccaaattcgcttaactcaatgtcaaaagcgtctgctaaaactaggaagtccattgattctaaaacttcgtttctgttcttagaaaacagcaaattagatatcaattcaatactcttgtgtatctctttaatgaaactaatggcatctttatagtaaacaatcattaactttagcttcatgagaacactggtatttgttgcatttatattctctacctcattttctattctagaaagttctgcgctcttattgaaagaaccttctaactcggtcctacattgaccttcatcttgttctacctcttcttcaatcaaagacctttcaatcgtgtcattcagagtttcttgtgactctactttctttaaagtggaatttagctgtgattcagatcctttgagatattcttcccattcactcagcctcaattggctaccatgtatggccttaaaaggatgttttagcaataattttgaaagtaactttactgagttcctacgaactaaagaggagcggtcctgcaatgatcgtactgccaacgaagtaaatttagctttgcttttgttaaatttcgaactcaaatcgcagatctttgaacacccttgtatcgccttcgttctaacgtagggatttgaatcctggaatctttcttctagtaactcaataagtacggctatttgttgtttataatgttccatagtttgtgggtcttgagccaattcagccacaatatttccacatgcttctacaacggaacatctcaatgttatagaactattgttgagtaaggtgatgacaagattcatctgtcgaagcattattcctggtgatagctctgataatttaatcaaaaaatttgatattgcctttgggcctgtggtatcctttgcgttaaataccctggtgctgatttctttcaagatatcttctgttagttgtggatagttatattcatcattcaatagttttagtaattctgcattaaaaaccgacaaatgaagaaaataagttaaatttgtcatcaatgaactttgtatacttgaactttgaccgtgatttttaacacacatagccaaaatcctttgaataaacatctttagtgatgataccttcgtcacaggttcaatctctaataacacaaataatggtcttgtgaacaaaccaataaacaaatccttttcaggagttgtctgaaatatcttagataagttaatctccagtagctttgttatagattcaagcaagttttccatttgattacagtctcttttaaacagctcgacgtttgcactatcattcttactgtttttggcagaacggtttagattggtagactgcgaggagaccttatgtaactcatcttgtaaaaacgtcaaaagtacctgaataaggtagccatactcttctaaatgccttttccactgcggtatcaggccaccaatttcagtaaagttaacatttgatgagagattagccttaatatcttttgacagattcgacagagatgaacttatcaaatagcttagttgagtttgtaatttcggtgttaagtgcgggaagtcatggcaaagatctattaatgcttctagtgaatctggactagcatctatttgttcgggtgaaacggccaattggtctatgataacattcagttctctggatgggtcctgcaagcgaggatatgattctcgatctgttgtttggaacttggtcagatactcggaaaggctaaagccggacatctcataaagtaacgaagtcagttaccacctatcaaaggataaagatattgttactgctgcttcctttacctttcttttttttggtcagtgacaggttattttctttgtttactaaatggtcgcaagattttcgcgatgcgtttaattttcatattattgctttccaatttacccaaagtgcaattgacaaaggccattagtctttctttttacaacagtaagaatataaatatacaagtgcagtatttaagatacttaattcgaaaagtgaaaaaaaaaaaaaagaatctggaattggttattttaatttctcatatgaattgctttccaaattcttgcaatcaataacattttttatttatttttttttcaagatcagaacatgtatatatatatatatatatactgttcataccaacaattatcatttagtagtaaagtttgtgataacgatcaagctagaaactccatagatatcctgacccttactcgttgtaaataaaaggctcgcgacaagaaaacaacgcgttacttgataataattttaaaatcaaacaaaagaggtgggggaaagaagcccttactattgaatagcagacattttattcatctcgcaatactactacatttctatgaaatataacaggtataaaaaatgatttcgcccaggatcgaactggggacgttctgcgtgttaagcagatgccataaccgactagaccacgaaacctattatttatgtttaatccacgttacaccaccaattatacaaaaataaaaaagaatgacggcaaaaaagcaaaaagtgacattaatcatatttgtttatgtcttattctactggtagtattcatccattagtatattactctctgtataaggttataatgttgaaatgataatcaactattgtgtatgatcaattggtgaataatttgataattgttgggattccattttgcttaaggcaatataatattatgtatacacaatatactagaagtttctcctcaaggatataagactcaataacatggaaacaacatttctccacaaaattttgtaattatctttcttccattttatatgtttcacatcctattaatcctcaattctcgcatgttcggtttcatattaaatttgactactgtttcacatagtatatttgttgaaatgaaactctaaaatatcatttattagtagtattcatgttactagaatctattatcatatgcggtgtaacaagatggcataaagattgggaaacagtcatcaaatataatggaagctgaaatgcaaggactgataatgtaataggacaatgaaacatataaaacgaaaggtgtaataattataagattttgtggagaaatattgtttctcttttattgattcgtatattctcgaggagaacttctagtatatttcacatactcaataatataacgtttactaaagatggtgttaacatgttaaaaaaacttcgattgttaagagtccttttgttatacaactctttaaacgactgtttaaacctatcatttcatcacaaactgtaaaggtaagagttaaagcagatatatcacctatcaactgcagctaaatatcgtgaaatgaaaaactaatcgttatttgcaccaataaagaacgaaaatcccccactgaatttaaaatatttctaaagaactaaagtcatttcgactaatgagaaactaaagtcagaaacaaaaatgcaaaagcaatattaacttatgtgagcaaaatatttcatatctaatctatgaaggcaaaagaatatgattaactattttattaattttaattaaaattttattctcttcattccaaggattttgttattattgtaatatgggcgatggttagggtgacggcgacttataaaaataatcacgaaaaatgtgaattttattagggctaagagaggttctctcctcatattctcctgagctgtcactcatattatcacctggaaaaaatggtaatgaggttgtggtattcaagggagaaatttccggagatgagctttccctcccgctgttgatataatcttggtatagtaaatcttcttccgcctttatggttgcaatggataactgagaacaagaggctgattctactggtcgctcctcttttcttttcatcaatgtatcggtagaattattccaagtggtgtaggtgaaggaagttctatgctcatcatcgtgtaatggcgtctcgtttaacgtggtccttgtcttagcgcttttccactctttggccaaattatcttcaagcttttgtgtttttgaacctaaggtcctatcatcggtatttaatgtgaatgtgtcatctattatgggaggcctgctaaaaggctctggttttggataatttttaaattgtaagatatctgagtcagccagtgctttccctagtccgtggttactaaattcccaatagttaaaatcttgtagcgataagtcatatgagctatcggacatgtcctcattagtttgggaatcaggcggttcaaagaaataattaaatggttcaatttcacaatcaattgtttcagctttgaaagtttgggatacaggttcggttttacaagccgcttttgtttcaaacgattgataaaatttgtgctttaacggggagtcgttgtagtaatctgtatctttaatgaattttctgagaggctttttagaattttcattatttttcgacatagtaacctctgcattgctagcccccattttggaaggcccaagattggaattaaatatcgatgaattcgaaaccgcacgatttagatttattgctgacaaagagatcgttatttcatagtttttatagtcattattatcgtaaaatgatctatattcgaaaccatttacatcataacgacaacagaactgcaaattcaggagacaagtagttttcctttcaaaaaagttagtgtaaatcaagttttttgatattagatttaacttcaacgcagatatatcaataataaatttgaattcgtcaacatgaggggtgacagacttgttgtagtgtgcattaatatagtgaatatctgcccagttatttaaagtaaattttatctctatttttttctcgaagttcaaattattgacaaatataaggccccagatttgacagttaccaaaattattgctacaaatatcctcgtagcttacaggatcagatagttctaatgaatgaacctttatattttgtccatttaagtatttgaaaatcttgtcttccaacccagtaacgtccactttatagtcacttttgaatggattcaaattattactgaccagtttccaatctgccatatcgaatgtctcctcttcaccaaagcagagaatctccttttcaatgaacatgctacgatcatgcataagcattgcattatcctctacgtcactctcgttgtcatactcaacatccttattgtcatattctaaatcactgtaatctaaaatgtctaaactataacgatgatcttcacctccaatgaaggggaacgttagtggaatggcattgttatgcaaatttcttgtaagatttgaagcggctttttctgatatcgagataggcgccaattttgtgttgaactttttgactgtgtataaatgtgcagcaaaccttaccgatttccctgatgatgaagatgatgtcgacgaagatgcagatgtagagtcttctagtggtgaaaatgaattagaggttgttgaggaaacaaaagaagaagtggagattgtttttgcgagtttcaaagacggtttaagcttcttaccatggctgtaaggcatttgtaaaaacaaagagtaaaattattgaccttataacaagcgtcaaagaaacgagcatagaagtattatacggcctttatttgtcagattatactccagacttagtaaaaaattcaattaaattccaaactgcttaccccagatttagtgaataagagccctttattctacccgcttatctctggatgtaaaacaaataaacgcgtaatagagcagtcaaactaacagcagtaaactgtcaatatcaaaaacgtaacaattgattcaaatcagtttattctaagccgcctatgccagcctttaattttcttctcctcctcttcactcccaggttaagccatttagtttgttgctatgcggtgtgtggcgtgtttcccttttaggaaaagtgattacttgcagtttcgcgaaatctcgaagaattttttcaacttattgaaagaacatgaatatacttgttaacgtgattaaacgttttatcagaacaacctaagagtatctccttggtgaattagaagccagataatgtcatttgatagaccggaaatatacagtgctcctgttttacaaggagaatctcctaacgacgatgataatactgaaatcataaagtcctttaagaatttcattttggagttcagacttgactcgcaatttatttacagagatcagttaaggaacaacatccttgtgaagaattattctttaacggttaacatggagcatttgatcggatataacgaagacatatataagaaactatcagacgaaccttcagatatcattccattattcgaaaccgcgatcacacaagtggctaaaaggataagtattctaagcagagctcaatctgctaataacaatgacaaagatccagaaaatactagtatggatactgattctctcttattgaactctttaccaacatttcaattaattttaaactccaatgcaaatcagattccattgagagatttggattctgaacacgtctccaagattgtccgtttatcaggtattataatatccacgtcagttttatcttcccgtgccacgtacctttctataatgtgcagaaattgcagacacacaacatcaataacaatcaacaatttcaattctatcacaggcaataccgtcagtttaccacgttcttgcttatctacgattgagagtgaatcttctatggcaaacgagtcgaatattggtgatgaatcgaccaagaaaaattgtggacctgatccatatattattatccatgagtcttcaaagtttattgatcaacagtttttaaaattacaggaaatcccagaactggttccagtaggtgagatgcctagaaacttaacaatgacttgtgaccgatacctaacaaacaaagttattcctggtacgagagtcactatagtaggtatttattccatctataattctaaaaatggtgccggatccggaaggagcgggggtggaaatggaggaagtggtgttgctattagaacaccttatatcaaaatattaggtattcagtccgatgtagaaacctcctctatttggaattcagtaactatgtttactgaggaggaagaagaggaatttctacagctaagtagaaacccgaagctttatgaaattttgaccaactctattgccccctctatttttggtaatgaagatataaaaaaagccattgtatgtttattgatgggtggttccaagaagatattacccgatggtatgaggttaagaggtgatatcaatgtactattattaggtgatccaggtaccgccaaatctcaactattgaaatttgtggagaaagtgtcacctattgcggtatatacatctggtaagggatcttctgcagctgggttaactgccagtgtacaaagagatccgatgacaagagaattttatttggaaggtggtgctatggtgcttgccgatggtggtgttgtatgcatcgatgaattcgataaaatgagagatgaagatagagtggccattcatgaagctatggagcagcaaacaatctccatcgcaaaagctggtatcactacagtgctaaattctagaactagtgttttagcggctgctaatccgatatacggccggtatgatgatttgaagtctcctggtgacaacattgatttccaaactactattttatcccgttttgatatgatttttattgttaaggatgaccataatgaagaacgtgatatttcaatagctaaccacgttattaatattcatacaggaaatgctaatgctatgcaaaaccaacaagaggaaaatggcagtgaaattagtattgaaaagatgaaacgttacattacgtattgtagattgaaatgtgcaccaagactttcaccgcaggccgctgaaaaactgtcatcgaacttcgtcaccattaggaagcaattattaatcaacgaattagagtcaacggaaaggtcgtctattccaattaccattcgtcaattagaagctattattagaataacagaatcattagccaagttagaattaagtcctattgcacaggagagacatgttgacgaagctattagattgtttcaagcttccacaatggacgcagcgtctcaggatccaattggcggcttaaatcaagcaagcggaacatctttgtcagaaatccgtcgttttgaacaagaactaaaaagaagattacctataggctggtctacttcttatcaaactttgaggagagaatttgtagatacacatagattttctcaattagcactggataaggccttatatgccctagagaagcatgaaacaattcaattgagacaccagggacagaatatttacagaagtggtgtatgacaacaataaagtcttagcttgacgccttttctacttgtttgcatgtaatgaatctaaaaaattcgctacaaatacttcattattatatttctatataaattctgtaaacgaaattatactttttgaggtttcatctgcgtctcatattctttttgtataataaacgcacagacttgatatgaccgtcaatcaaaataattcaaagcttcttaaaaaagaaattgaaatcaaagacatacgaaagaaattagaaaatagaggtcgatttaccactgaacaatcctacagtacatgagctcttgaagtgactttatggggaccaatttgtcctatcgtgatattactacgggtaatactaccaaatgaaaattatcttactcaaaaggtatgacaagaacatcatcactagaacatcatcattcttaatagcaagcgccatcacgtttgccccgcctttgacagttgattagaggagtattataaaaccgttttatcatgtcgtatgtttgatcttaaccatttttacatcctataatttggagtgaatttttatatactaacttaaaagtaattgatttgtatctttccagttcacaaataattgatcgtccaaaacatgaactctctagagcagaattagaggaactagaagaatttgaattcaaacatggtccaatgtccctgataaatgatgctatggtgacaagaacacctgtgataatctcattaagaaacaatcataaaataatagcgagagtgaaagctttcgacaggcattgtaatatggttttagaaaatgtgaaggagctttggacagagaagaagggcaaaaatgtaattaatcgggaaagattcataagtaaactattcttaagaggtgattcagttatcgttgtgttaaaaacccctgttgagtaaaaagtaagacaagcagccctcaatcaacaaggaaagcaaatcatcgtaagaaactttacagtcagcggaaagcctttttttattttggaagtaagaccaattattattggctgattttctagctcttgcgaaagtattatattcaagaaaacgaataaagcatctatattatcacatttaactaaagagcatttttaataagtagatttttacataaaatatagaataaatatcaatattattaatcatttgaagttcttcaacgggtctactttaccattctttggcttactgactcttccctttttatgtgaatggcgcttcttagcattgtggaaaggaacaaacttgactttggttccatttcctctggctgattcaggaagcaagtaatctggaacacgctttaaatgctgttgcactcttgctggatgtaattctttatcgtgtcttaaactttgtagctcttttggattctcctcaaaatgtcttttcaacttctcacttgccaatagttcttgtttcaactctttgaccctagcttctctaatggcaacttgagtaacagcacggaaaccgtcttccattctgtaacggaacgcctcgacctgcttttgatcgaatttgtaaggctgtaattctaatccaagtttgctctgttgtttgatgattcgtgaaagaatcctttcatccttctttgctgtctgtagcattgatggcttatgcttaccaaattctttcagtgggactacgaatgaaattgcagtaccggtctttccgccacgagcagttctacctactctatgcacgtaggacttagccgtcgtaggtaaatcgaaattgaggacacatgcaacatttttgaaatcaacaccacgagaaacaccatattccttatctttcttcacttggaccttctttttcttgcttggtttcttatcgttctcaggctcgccttccaagcttttttcttcttgattttctgtattgtgcccttcttctatttcgtcatcttcctcttttatgtactcggtgtcatctgtggcaatcaatagttggtaaacgtttttattgaattggtcaacaatatgttgcctcgaattaacgggtagctcgctgtttaaaatacaggacttgataccaaattgttccataactagcttgagcctatatcctctgtcaatattatttacaaaaattaatgttttacccttgattaagttaagtttaaaaatgacatagcatagtaagaatttgtcaaattcactgactttaacgtaatattgaagtaatttgttttggttcttatttatttcctcgtcattgaatttaagaatagctggagaacgacaaaatttttgtttcaaagcctgtatatcgtcatttagggttgcactcatcaaaaatgtttgtaaattttttttcaatggtaagtactctccaattttgtttaaatcatcttgataaccaaatgttaacactaaatccacctcatcaactactaaaaattttagttcgttcaatgagatagaattaatctttgtttgcaacaaatccaataatttaccaggtgtaccaactatgatttctggttgatccataagtagagtgctcaaaactgagtcagacatatcggatgatatgttcagagttcttatatcttttgaacaatataagactagtttttctaaaacattatatacttgttgagccagttctcttgttggaacaagtataatacctagtgtaccattttcctctccgttatcaattgtttttttatattctaggatagtttcaattacaggaatgaggtatgccaaagtttttccggaacctgtagcggcctttgctataatatctctcttctgttgtaaagccaaaggaatagcatgtgattgaattaatgttgggtactgaaatcctatattcttaatagcttgtaataaacgagagtcgagatgaaatgcttcgaacgttgtagaatcgtcaatataagcgccttccacagactttttctcatagctcatttttttgatctttcgttgcagttttggcttagtctatttcttttgtgagataaattgtagattgactataactatcagccaaaacaaaaggctcttactcaatgaaagaaattagaagaatcgaaatgaaatgagatgagatgagatgagatgagatggtctagaagagttattctttatgttcgtgaaaaaaaatttttaaaatttcatctctaggtttcattacgtaaagagtgattaaggtaaacaataaaaggcagttctaaccagattttggtttggtattacttctataaagtagtctacttagtatgcgtaactgtttttaacatagcggtgtgaccaaattaccaccaatatttaagaggctttccaccctacctttcaaaggatttgaattacattctaaaattttcatattgttgaagtcaatcttagcagtgcttttacctatggtaaccactccagttatagtttcctctttattacttgcatattcatctttattgagaaataaagtaaaacagtcaccaaactgttctttaaacaaccttgagatttgcttcaccctctcaacttcatcaatcttaccttgtgcattagactgcacattgttatgatcatgatcatcacaagaatgactcgaaagcttgacactggcgggagctgaatccacattcataagtatagcaataatggagtctgctacagtgtcattcattaaatcttgagtccattccacaacggctagagtattaacaatagttaacttaatatcacccattatctgtagaatcaatttacctgtattggtcagattgtcttttgactcttctttaacctttggttcttgatttgttactctatcatcatcttgaagaacttcagcctctccaaacatttgtaaaatgtgccagtaaattagctcctttttacaatttacacgaactgactggcgctctcttaatatcgttgtagaaagatcgggatggtgctctcttaaatcagacaaagaaaggaagtctaattcgaaatttttgtcatctgaaactagaatcccagaaacgactatgtctttgtgttcctcttcatcaaccaaacctttttctgcttgagaatccaagttgtcttcgttttcttcctttataggttcaattttagccgcaatttcttcctttatctctacgttttcttctttatatatttcgttcacaatatttcccacagcttttgcaaccttgacaccttgaaattcaagatctacttcaacacagtttctaggattaaaaacatggacttcattatctgtaccctttaaagacgcgaaattggataacaatgcagatttcaaacggcccatgggattggcttctccatgaacaaggatgatatttggcgcactaatcttttcaataaattctaaattttcctggaagtcaacgtgtgcggcaaaggagatttcttcaacttgacaacgtcttggaatggttatttccggattatttatggaaggtattgtatctggctcaagcataataaatttcgccattgttccttcgatggagtaaccggtgattagtactagatttttatcttcagggcaccacctttcaagtaaatctcttgataacccactttgcagcatacctggtgaggccaacatcacactgggaccaaaatcttggaaatcctccaagtttctaagataagatatatttttgaatatgaagggattagtctgagagtctctaaatttttttctaatgtcatcattcatcatatttacataggtttgaaaaacgctcatacatttttttgccaaatttgatgcataaaatattgggacttgtccaccaccgagttcatcagcatgttgagaccagtactcatccagtataagcatgatttcttgagctctccctaaagcaaaaacaggcagtagaacacggcctcctctcatcactgtggaatggattagttgggttagcttcctttctctatttaaacggggctcgtgagtagcggtaccaaaggtagattccacaattaatacgttggatgaaagtggaggcacctcagcagaatttaagtgacgatctacttctctcgaatagtcacctgtgaataacaccctaaggccagcaatctctatttgaaacatcgctgcacccaatacatggcctgcatggaatgccgtaaatttgataccattgacgtcaacagtagaatgatagtccaccgtttcaattttatcgaaagaatcaactaaatcctcatctgagaatagaccttcgtctttagtccccatagaggaggatgaagaacctatactagtaactcttacaaaatctcgcagtagccatctgtaaatggctttggttggatgtgtcatgaaaactctgccttgaaagttagtccgttgcatcacatacggaagtgaagcggcatggtctaaatggaaatgtgatatcagtaagatatcgactttggaaagatcaaattcatcgtaaaaaggtaatgaagctaatccttgatatgccggatgaattcctgcgtcgagcatcactgttttacctttatattgcaatatatgacatgatcgtccaacttcgttacttcctcccaatgaaaaaaatttgaatgttgttgtatttgttcgctccatatatgcgtatacttattaatgttaacttattatgttactttttatttcctcaatggacaaaattcaattgataatacaatgtttcttttgtgctgtaacttttgaagtactgaaaacaagggtaaaagaaataaacgcttatacccgtgaacattttgaacctattagatgtgatctcaatatgtattgcgctgaagcagtagaagttgttaaagatccgctagtttttcataattttcggccagaataactgcttacccgtatttatttgcaaacacgctacttagtcttttggagaggactttatacaggaaagaaagagttttattgattttaaaaacaatataaatgaaagaaaaaaatgtgttttagattaggcttataagatatgacccatatcataattaaaaaaagcgatttagttgttcttttaaaaaaaaagagaaaaaaaaaaaaaaaaaaaaagggaatgagtttgtacatactattatattaatgtagtatcacgttaaaaagccgtagtcatcattaatcgtccaaaagtcttctaccggaccagatgtcatcatgttatcccagttagaacgctttttcctgatgtctgcgttagttactgtaggaataacattgtcgaaatgcagatttgcgctagtgtttgcttccacctgtgttttaggtccattcttctctgtttcgtcaagattatattgtacaccttcctgattggacatcatgaacaaatttctgttatacgaagggtcattctgcgtctgttgaaaattattagcggttacattgttttcagaacacatattttgttgttgatgttgttgctgctgtttgtccatggacagagatgaaggctcttgactctggggaaatattgtttgtagtatggacttgctattcaaagcatctagaacggagttattggtccaggtggaaatattgttgatcatgtcatgagcaccgttgctgaaaagtatatcgcccgaagaagagccatttcgagcttgtttgacactgaccggaattgaattgctagtaaatgacgctggtatcgaggagataatattattgccataatctgctcttaggggtgatgtactgaaatttgattcttcgacatctcttaattgcttattttcacttgtatggttagagaatattgcagattgtagaggattactgttgatcataccattgtttaattgattcgtaaaattgctttctgagaatctttgtggagaagtaatatgttgttgtggctgctcccgctgttgttgcggcagtggtcgtgatacatgctgttgcggtagcatattggaagtttgaggatatggagttgggctttgcgtcatcgctattggaatcggatccgaatgcgaagaggctgtagatatgctagaagattttgaaggacttctattggtcatagtatcggtgttcagggacgatagatacgcttgtaaattgtgctgagctagttgctgttgtagaaaggcctgctgttgaaatacttgccaatcaaactctgtttggttggttggtttcttgacgatatattggtcttgaataggcctttctacatcattttccatagttacgttgttgttacgaacatactggctgttgttgccattattgcagctgttgttggtagtgcttctgctattactttcattatcattattattaacattattattattattactattattattattattgttattattattattattatcattattattgttgtgattattgttgtgttctctgttgacgctgctgatggtcataccattgttatcattgtttacattgattttcaggtttttttcttgggaagaaggaaacgataatgtcgacgatgatgacgaagaagaagatgatgacgaagaagatgttgtataagacattgaagaatttgaaatacgtgacctgtcatccattttggttaataggtgagctaaacttttgggtacagaggtcttttctaaaacaccttgcttcttcttgaatttctcttgttcagccaaatccacttgtgaattttccacaaaaccggcgtgctcttcagcttgtcctttaccaaatattctagccacagcaggcggcataccgccattatgagatatatttttatcgtttgaattggatagattagctgcatttgcggagttagaatcatgaagagtatccccagatgaaattgccttattggcctcatcattgatgttcttgggttcagtacgcttggcgacactactagccatgaaaattaactcagaagagtctggaccacatctttcaatcaaattacctaccgtggcattcattaactgatcgaaagtatctctaaaggttcttgcaaaattagacctttctgtcataacatataaacaaacggagcaagctctcaaatcatccatcgtcgaaaagagacttgcactgattaaaggtctagtatgcttcgaagcatcgcctaatttcttcctcctttgatcgtcaaaattcctggctaaccacatacagtagattaaagttacgccagctacaaaaaccgtatgcactgctggtgtagaatgaccattaagcgttttttgatggaatatcttgtataactgacaaatttgacccgcagcagcttgacattctctaaatagtctatcctccggggcgaaaaattccaaatatggttgtataagcaatcgcactgatctatagtaataaagttttagtgtctcgttttcgaaatttttcacgtcaagagtggaataactttttctccaaacttccaaatcttcaaaaaattttcgtactaggggcaattgatcaatggattgcttcactgacctggaatcgtttttcaatagctgtaaagtctctacaaattgagattcaattcttcgcagctttagagactgattgatgaattgcacaccatggtcattggttgatggagccgccgcatgcacaccttttgtataaaaagagtcgttattgaaaagaggtaaatttatttccgactccttgattgtataaggtttccccacagcaacacaaatcattctttccaacaggtaaacacaccaaaatagtcgcagtttcttatttgcaaatggatcattaggataccattgatttagatgaagtttcttcttggatatgcccatgacatccttgattatgtcatatagtatcagagaatctctatcagtcctaataatgtaaaggacaagcaatgtcaacagttctatttgctgaacataattcaaatgtagaccacacttagtgatgtgacggatagcggtggagaaatatcggtgaggtggaaaccccttgtacttacctgtggtcatcagtaagtaggcgctgatgctgaagacaagccacattctgccggatagaaaatgaaattctatttcagaatacgaatgtgaattcgacggtggtgctgcggaagacgtggcgggagaagatggtgggataagaatcttgttgtggaggtagtggtcataaaaagtatagatttcttgttcgtctaagatagggtacttgaattgtaatcttgtgaaaaaagtgtccaagaaggaacgtgacagcttctcattcagttcaaaaatagggtcatacatcaaaaactcttttttcaaattgtatttggcaaaaatacacttagtgaagtccagcgtctctaaagggtcattcaaaaggctcgcggattggcagatagcattattgttgtttatgttgttcgtactggccgatgtatcgttagtggccgcattaacgttgctgccgttattgtttgtgttctccaggggtttgttggaaggagatggcagcggcagtatgaccatattgctgctgttcggtctagagtaatcagaagtgttgttactgaacaaatgagaaaccttcttgtactgggataattcgtagttgtactggttgcatcccggcgataaatcgagcaaagtctccaaactttttagttttttctccaagaaaatcgtatactgatctttgtcttgcctcatcaggtttggattggaatttgtcgtgacggactttatcgttttcctgaattcattcgcgtcgccagcatcaacattactattgctagtggaaatgggttttattatcgtcatgtcattcagagaagtggcagcgccagcgccagcgccaatactgctatcttgcagctcacgttttattacaggatgaggtgtaggaggtacagtgccagctgtaggggtgttgttgttggtgttactgttcgaagtggaagaagagtacttggagggctgcacgcactttattcctgctttcaaacaggcggtacaactgggtaatttatggtcgcatcgttgctttcttcttctacaaagaagacaagacctggaacggccctttttgtcttgcaacaagacgtctgtcctgttaccggccagctccagttctctcttcaactgttgtattttctcctggctaacattcttccttggacggcccattattatttacgtgtattgttggtagttagcccgaagattatgagtacgtgaaatacacttgtctttatgaaagagtggaaaaatggtggggagtaagttatactattgacgtgtaaaaaaaaaaaaaaaaaaatgttaatggaacgaccgatctaaagaaccatatataatgaatgactaaaaaaagcaaaatagttaagaatccaagaaagatactaagaaaaggcgaaaagaaaaagaaaaagtatgtccgctaacaaagattagcgtataagcaccacacgatgcgattcaggtctcaacgtgcagtgtgcaggagcaggaactattcaatgtattgttgttccagggtttttgttcgcaacccacgtcttgaccgacggtacccgcaggtgaaaattttagcaaagttacactttttttttcatttttttttttcttttctcctccatctaatttcacctgcggttaccggcggaataactcgcgcaccatttctctgtctcgggcctcgcgttcctctttttcgactcgagcggcctcttcacgctgctcgtacttcgcgacgctgcgccggcgctgcgagcgtttctgttgacggtgccactgtagaagcgcctcctctctggacggcatcgtgtcgtacgacgccgcaagttcgcgcgcgagcttaagccgggcaagctttcgattttgctcacgtgaccgcgtttcttggcactcgacaacgatcccagtgggttcatgccgtagttgtaccttagaattacacttattaatcttttggccaccgggccctctgccgccatgaaggaatttctcagtgcattgtgcttccatctctggcgtgaactttggtcgcggtggtagcttgttctttttaatcagcagcactgcggcactgctgattgacctcttactcgctcccctcatcatagtttactagtctcggattcttctgcgctttttccagggtcgcatagcttgtaggttggtagcatagacttatatataaactcatatccgttctaggaacgtatagcgcgctatggtagtccggggaaaatgcacagtttagttaagtgtatagtaattttatcgataaaggaagaatggaagaggtttatgtatacatgtaaactctgaacatctaatagactaatgatgcggttaatacgtacattgccgcttcgatgcttcaaaactagaatacggcggcaaggctcgttgttgtgtttgcggtgctttagttcgtattcaaaaccacttttgcagaaatcaatgtcattgaaaaatatccagttatcagacctatcctcatcgccattatccaagaacaaggagaagcaggagaagccagagaaggaaaacgaaggaaagcactccattggcctgttagacagattttcagaggactttattactcagggcaatggattgaaacctactacttcacaaaatcaattggatactataaagttttatcaaatgcttcgtgaaagaggcaatttttccgatgaacaatgtaaaattatcatagctctattgttgcaactactaaatgatcagttttattcctgttacaatgatttgttcttaagggatatggagctgaataaacaatcacatttgttcagctcgctagaaacagaattgaaattcgcaattcaaaactctagagacacgcaactaaatgagcaccacttgcaattattaaaactcaagagagaacttaactcaatccatgatgaactgaatgaaatcataatagatcttttgcaaaaggacgctaaattagaatttaacaatcaaaaattagaaaacacccttttgtatcgacaattaaacctgaaattgaacgactgttctaacaagattcaaaccaagatactgggggatatcaggtcacatatcgaaaatttaagatggcagacaaccagaagcggtcttttggtaatattagtccttgtttgttcgattatgatcggtgtaagcgcatctaagaaggaacgcccaggtttacaggaacctgaggaacctgaaattttagcaccaaaggaagacattgatactaccttccctcaagatcaacatgatatagattaattagcatacatattgtctgtacataagtatattgtgtgtgcgttttgtttcactgagaaagcggacgtcataaacgatgcttcctttgtttcgagcccagctgcctaaatctttttaagggctctccatctacccaatacttgagagattcatttacttccactgagttagccttattgaatgcatcgatgtggttcgatttcagcaattttttcatccctaagcaactgggcaggtatagccctttcactttctccctcaattcttctaagacctttgcattgaacgcttcagcgtttgaagatggcatgttaaaattcttgcttataaatccgttctcgcacattatatcgtacttgaatggtttgttgaacatgaggcattcatacgtcgtatttgtgccaaacttcaatggcaaagagaccgttgtaccaccttcggtaattagtcctaagttagcaaaggggtatagcaaataaaccttgtcatttatactgtacacaatgtcacataacgctaccagtgccgcgctcaaccctattgctggtccattcaaacagcaaattaaaactttggaatgcttgatgaaggcatcagtgacataaacatttctagcgacaaaatttgacacccacttgcttgtttccgaaggatatttattggtatcatccccttgggcttttgcaatacccttgaaatcagcaccactggaaaaaaatctaccactgctttgtataattgtaaaatatacatcacgatttctgtccgctagttctagtaactctcctaaataaatatagtcttcaccttctagtgcattcaaattgtcagggttcattaagtgaataatgaagaatggtccttcaatacgataactgattttctcattttgcctaatttcttgcgacatattgttcttccttcctttactgtgcgagcaatttgtgccatacactccaattatctatccatatgttcatctttcagttcttatatatagtgcttcacttttattaaccgctcttggggtaaaagagaaacggtcactgctacagcctttcggaataatatttcttatgcccgtcgccaatttcagattctttccttcgtgccgcatttattttatttttcaaaatgacgagaagttaaaatctaaaatcaggaaaaagaacagttgcagatgacgaaatacttcgagcattatcgcaataaataaggcgtgtaaacgtatgtcagatatagaatcattgggagaggcagcaggtttatttgaggagccagaggattttcttcctcctccaccaaaacctcattttgcagaatatcaaaggtcacacatcacaaaagagtccaaatcagatgttaaagacatcaaactccgtctcgttggaacgtcaccactttggggtcatctcttgtggaatgcaggaatatacaccgcaaatcacttggattctcatccagaattaataaaggggaagactgttttagaattgggtgctgctgctgctttaccttccgttatttgtgctttgaatggggctcaaatggttgtttcaactgattatccagatcctgatttaatgcagaacatcgattataatataaagtctaacgttcctgaagattttaataatgtcagtacggagggttatatttggggaaacgattattctccattgttggcacatatcgaaaaaataggtaacaataatggaaagtttgacttaatcattttaagtgatttagtcttcaatcatacggaacatcacaaattacttcaaacaacaaaggatttattagctgagaaaggtcaggcgttggtagtattttcaccgcatagaccaaaattgttggagaaggatttagaattcttcgaattggctaagaacgagttccatttggttcctcagctaattgaaatggttaattggaaaccgatgtttgacgaagacgaggaaacaatcgaagtcagatctcgtgtttatgcgtactatttaacacatgaaaagtagtaagtgggcggaattggcattctcaacaatcatttttatgtttgtaaaccagtgtcctttgatatgtaacaattaaataaaataagtcatgatggggcacgaattcgcaaaatggtagaaacacagtaaatcgaagaaaattaaataattcgttatagatataaagtagtcgattataaaaacgtaaaaacatgaaggcagggtaccttgacgaaataaaagagaggcggtgagatgaggtgaaaaataaagaatattgcaaaaaaaaatattcggactctatgaatcaatctctaataactttaaaagtaattgctttccaaataagagaaattacattgggtatagactgagtcgccggagtcataagcataacatgtggttccagaagcacattccatgtaaacccaagcgctatgatcacaaacggcgaacttcccatcagcagagcatgcaatttcaccttcagtacaggtagatttaccgttcaatttaccagccgcatattgagcattcaattctttagccaatgtacgagctgtactgtctgagcttgtactacctgagcttgtactacctgagcttgtactggtcgttgttggggaaagcgtactagtagtagctgtctgtagggaaacgacagaagaactcttcgttgctggcgaaagagtactagtgatagctgtttgaattggggccgaagaaactatgctagtagtagttgtttgaggggtcaccaaggcagcactggttatttgggaagatagagtagttttcatacttgtgatagcaactgaatttaaagtgctctctgttgtggtggtacctagactagattttgtcttggtgctactcgtcaatgtttttgtagtttgagtaattgatgttttgatagcgctgcttgcagttggagataaagtaactttgcttttactttgtgtagatgtcgtagattgtgtggtctttttctgagaagttgaagcagatgaagttgaagcagatgaagttgaggctgctgaggtttttgaggtggcaactgtagtagtggcggtctggctagcacttgttagcaaattcttcaaaatctcaacatatggttcaccatttagctcgttggaaaaggcttgagatgcatcccataacgcaataccaccaaaagaacttgaagaggcaatatctgcaatagttgattccaataaagaagtgtcagaaatataaccagagccagcagcagaagcagaaccaggtaaacctaagaacagtttgatatttttatttggggatacagtttgagcataggttaaccaagtatcccaattgaattgaccactcacactgcagtaattattgtaaaattggatgaacgcaaaatcaatgtctgcattttccaacaagtcaccaacagaagcatccgggtatggacattgtggtgcggcagaaaggtaatattgctttgtaccttcggcaaacaaagttcttaacttggtagctaacgcactatagcctacttcgttgttgttttcaatatcaaaatcaaaaccatcaacgactgctgagtcaaatggtctctcactggcacctgtaccttcaccgaaagtatcccataaagtttgtgcaaaagtttccgcttgagaatcatctgaaaagaggtagctaccagatgcaccacctaatgataatagaactttctttcctagggactggcaagtttcaatatcttcagcaatctgggtgcagtgaagtaagccatcagaaaaagtatcagagcatgcgttggcaaagttcaaaccaagggttggaaattggttcaagaaagataataggaaaatatcagcatcagaagattcacagtaagtagctaaggattcttgcgttcctgctgagttttgaccccaataaacagcaatatttgtgttagcagacctatcaaaggcatcggttggcagtagtaagaattgtgtgaatagaagaatgatgtaaaggagtgacattctattattaattattttatatttaaattagaatttcaatgtattggaaaaagagtggttttaaaaaaggtaggttgtgaaacgagcgacagttattatttttggatataaaaaggttcaaaggaatgacaggtttattttttttatgttattgagtcttaaatgagtgaaagatcttcaatgttatgaaaaaacttgactgatataatcttaatgtaatgtattgttgttgtccattctataaattatacaaggaaaggtaagtgagacgtttttcctccatccaaggacctaatacctgcatctttttatatctttgaccaatgcctatgaagccaaatacttccgtccatattagtttttttttgttccttgaatcctgcaccgaaccatcgaggggcttagttcttacaccaatgctaatgtttactcaacatctgaaacacataaacaaataaacaaacaccaaacattgcacgttagaaactcatatttactcgcacatatctgttaaggcgaggctggttattttttcaagggaccagcatttccaatttttcaccagcggcaaagaaaaataccaacaagcaggaatcacacccacgcatctcattttgcgttactatgacaactacaaaatttgaatttgttaacgagaatgacgtatataagttcgattttgttgaggatatcccacatattcccaccaaccaaccactatattaatggacatggtttttgccgtgaccgtggatctcgcagctacacaatgatatctcttgtatccgttttagcatgaatttctaaacaagactgattatataccatgcactgtaacattcagagaaaatatactaaaacaattcattgaattttatctcccatgtgtcaatccatttctttctttttggatcaccttcatatagtttactcatttggataagaacttttttagttactgcaactaatgcagcctgttcttcttttacctcctcattggtaaagttcttcggctcaaattgtacagtggataccacttcatccaaaagtaactgtatttccttcagatatgtatgtatactgtctaaagtttctgcttgattcctcttaggagtaaaatcttttgacaccagagttttcctgaaagttgatacaagtaatttgattagctttatcttcctcgtaaacccatcgaaaaacaactttatattttcatagaccttttcctggtcaaattcctctttctgtgaatcagattcggattctgaatcctcaaaatccaaaaatatatcgtccgagtttgctgaaaaatcgggttcctcaagccactcttttatttcattcattgtatcgtccattatggccacattatcttttaagatgtttgctaggatcccataaggtccagccttggaacaattagagagagaatcgcacgcattgaatattttaccaactgaggttaacctttctttgtctagagatgcattttcgtcatttttcaatctttcttgtaattcggcaatgaaatctctcaagccatcgagcaattgtagcgtactttcatccagttggtctgtaaagtatttggggcaatccttgttattgtaaaacaaagggaataaacttagtaagtagaataatggcctactaaaattttggatttcggtaatcacaactttatgattgttatcaaaagttcctggcttgcaaacaatacctatttttgtgcaatgtgccttcaatacagaggctaatttgtctagttccttagttggggtggaaccttgtagtttggtagtagaggagattttacgcaagtcttccggctttttgtatggcactaaaaactgttcatctatagaattcagcagttccaataatttgacgtcatcctttctatcactgcttccagtagacattattgtataactggtatttctcttataaagtttataataggcgtctctggtgatgcttgttgacctcaatggattttgttaaaaggaggcttcatgtcatcgtcaagatcattgcagtttttttctagttttttttttttcattgccacattatgaagcgcccattcaaaaacaactagaaaaacgtttgccaaccctaggtacggcaagatcctccttattaataaaagcatcacaccaagacagcaaagaagtaaatcgataatatgaatagcataattttgcgaagttaaagtcctaaagaaataatttatagttaacactacttacataatttcaatactgctttatatttaaagtaaaaaacgcataacggaaatacaaatacaagtcaaaaactatcttgaagtaaagatggcatgactgctattttgtttcttgttacttttaagctccttttccacaactgttaattttcttattggacggatggacctgggttcattcttctcttaccgttaaccaaggtaacgttaacgaatcttctggtgtacaataatcttttgtaagcacgacccttaggcttctttggcttttcggttttttcaacctttggtgtttgagacttgactttaccagcacgagctagagaaccatgaactttagcctaaataaataatattaatattaaaaattaatgaccatgttagtatagtgaatttttgaattatttggcgtatcagcaaggatgctaaaaataaacttcactctgctattttctcaaagcctttttaactctccgtcaaaaaatgttgttattaaactcgacattatgttaagtccacgctgttgccctcgaaaaatctgtgtcaagcaattacgtttttgatgtaacagaactcaaatttaaaaagtttcctatcatattctcagggtggagccagtttaaagatatattgcgttttatttctttttctgcggtatatatagatatgaaacaccagtaatatattcaaattagctatttcttgttattcattcctcgctgaaacgtccatttttttcatattttaaaatcctaatgaggcattacgtaccatatttgcgtagtttttgtatggggatatggaagattattacagtggcaaatttaatgtgcagttcatgtagcctttaaaatgcaacataccgttcgtaaggctgttttgttctatctattttttctgaggtttccgacaacctcacgacatttttttttttcgaacggaaaaaagaaaagcagttagtatgtaaagcacggatttttttatacatatgtacggatgtgatagtctgcaactctgcaactctgcagttctcagccatgtcagatttaaagagtttccttagcaacgtagcaaagaaatgtaccgctgtagggtttacaagcccttcgatcttgctatataatatatgatttgtcctctttcccttggtttttccacatcttcgctatcttccaagctaccacgatccaacgaacagtggaatacgcaggattcgtcgtgagaaatcgccaaaacaacttcttcaaatgcagcgtataacttggaacacaccttccaatctttgcaacggatgattacttcatgtgtggacgaactttcctgttcagccttttccaccataacggatatgtcattaaattcagtatcaccgctagtatcagctgtgtaaatgtttccccgcgtatctgcgatcgagctatcctcaattcttaataaatcttcatcgtagcggatattttcttccatctctcgatctctagtattggtatatagtgaagacatcggtttatccgcttcgataatcggaagagatccttcctcctgccggccgtctgtgtcgatgtgctggttttgggaaggattgtcagtgagcccttcttggcgttgtatcacagagtctaagggtccattccagcatatttccaaatgccaatctaattcattcacaattatcttaagttctacatcatcaccttcatttccatgctccttttttttgactcccattaaatgaatgtggttgacattactgtaccgttcaacacgtctaataaacccgtggaaggcggagccaaactcgcccgatattggtggcagcttgtacatcatcagttgaatatagttaatcattggctcttgtattcgcgtatcttgtgctcggaataatagtttgacaggtactttgaacgaatgcatgataaccttattgcttgcgagtagatttcctgtgcctactgtggttggtaaaccattgtgctcatccactcccccattcataactatagcgtcatttgggccgctagtatgtacaatttcttcgaatgttatacctagagcacaaatggggttcggttttgaggttgtatctacgcctcctgctgttcctcctgaaagtgttccgttatttgtattccattctggcattgactgtagttttatagtcatattagaggaagatccttggttcattactcgatcataccttttaaacacactcaataaagaatcacaattacactccattgttattgtattgagctcgcgagctgatataactgtatataatctgaatacatcatgaggaatggtacaccaaagctgaccagtatcccctcgtaatattgtaccgttgttactgctgttgagtgatgattttggagtggatattattgtcaatctttcactattaaatcttaagatagccgtctttcgtagcgaagcaactgtattgatagtagttcttagcaatttataatcatcaggtgcttcacaaccatttactatcaattttaatttcatttaactgaattaagacacaccttttgtcttcttttttctctcatcatctccgtatgtttatgttgctattttgatgtaaataaaaaagttgaataatagacgagggcaagtataactcgcctatatttgtagccgcaaccattgaaaaagagccatgaatatgggaaactagttgcacataaaaatgctgaaatttagaattaggccagtgagacatatacggtgttataaacgacacgcatatttcttacgatataaccatacgactacccctgcacagaagttacaagcacagatcgagcaaatacctctcgaaaattacagaaatttctctatagttgcccatgttgaccatgggaagtcaaccttaagtgacagactgctggaaataacgcatgtcatcgatcccaatgcgagaaataaacaagttttggataaattggaagtcgaaagagaaagaggtattactataaaggcgcaaacatgttcgatgttttataaagataagaggaccggaaaaaactatcttttacatttaattgacacgccaggacatgtggacttcagaggtgaagtttcacggtcatatgcgtcttgtgggggagcaattcttttggttgatgcatcacaaggcatacaagcacagacggttgctaatttttatttagccttcagtttaggattgaaattaattccagtaataaacaaaattgatctaaattttacagatgttaaacaggtaaaggatcagatagtgaataactttgagctccccgaggaagatataatcggagtaagtgctaaaacaggattaaatgtagaggaactgttactaccggctataattgatcgtataccaccaccaacggggaggcctgataaacccttcagagcattattagtggattcttggtacgacgcatacttaggagcggttcttctagtgaatattgttgatggttctgtacgtaaaaatgacaaggttatttgtgctcagacaaaagaaaaatacgaagtcaaagatattggaatcatgtatcctgacagaacctctacaggtacgctaaagacaggacaggttggctatctagtgctgggaatgaaggattctaaagaagcaaaaattggagatactataatgcatttaagtaaagtaaatgaaacggaagtacttcccggatttgaagaacaaaaacccatggtatttgtgggtgctttcccggctgatgggattgaattcaaagccatggatgatgatatgagtagacttgtcctcaacgataggtcagttactttggaacgtgagacctccaatgctttgggtcaaggttggagattgggctttttaggatctttacatgcatctgtttttcgtgaacgactagaaaaagagtatggttcgaaattgatcattactcaacccacagttccttatttggtggagtttaccgatggtaagaaaaagcttataacaaatccggatgagtttccagacggagcaacaaagagggtgaacgttgctgctttccatgaaccgtttatagaggcagttatgacattgccccaggaatatttaggtagtgtcatacgcttatgcgatagtaatagaggagaacaaattgatataacatacctaaacaccaatggacaagtgatgttaaaatattaccttccgctatcgcatctagttgatgacttttttggtaaattaaaatcggtgtccagaggatttgcctctttagattatgaggatgctggctatagaatttctgatgttgtaaaactgcaactcttggttaatggaaatgcgattgatgccttgtcaagagtacttcataaatcggaagtagagagagtgggtagagaatgggtgaagaagtttaaagagtatgttaaatcacaattatatgaggtcgttatacaggcccgagctaataacaagataatagctagagaaacaattaaggcaagaagaaaagatgttctccaaaagctgcatgcttctgatgtctcacgaaggaaaaaacttttggcgaaacagaaagagggtaaaaagcatatgaaaactgtaggtaatattcaaatcaaccaagaggcatatcaggcttttttgcgccgttagcattgcatattattgttattaccattttaaaattataccaagctgtatatagttaagtacttttcatttgtaaataaaagagaaaaatagattaataaatataataatggcataatcattatgctttaagtatttcctcaagtgtaactacccctttaaaatctgggttttcgatatttttcaggacggatttgcttacctgctgagtggatactgttggcctaatcaagtcgttcaaaagctgcagcttatttctcaatagaaatttgttaccgcagtaaagtagttcaagtgcagtatgaataaaagaccgtggtccaattgcatttctgtgctcatcgaacataaaaccgggtctcacaataataggcctgaaatatctctgcattttttctagttcaatctccgcctctcttttcgaattaatatagccactaggaatcaatgggaaacctttatcggcggaaatatacgtaaaagatctttgatttgctttttcttgctcctttttgcttttctttaggattttttgtttaaatgtatctgccaaaataatagcactttgcttattcatcatttcataagtaaaataaggactgcttttttttaaaggatttggacctgcaccaaaagatagaaggcgtgattttgaatcatatgtaggggatttggatagagtttgcttataattttcattttctaggaggattcccaaagaatgaactacgttagtagcattattcaataattcatggtaagaatcaggcttaaaaatgtcagcagcggtccattggacctcctgcatccattgcttatcatttaattcattgctatgaggagctttaccggaccttgacacagaaacgacttggtagcccgaagtcactgcttcttgacaaattcttttacctaaaaatccattgcctccaaaaactataagctttggtatcattttctacttcagttcaagctttagctgtatttttgtatacgatacatatttcccttatttttttattttttcaatgttttcctgtttttctattatgcaaaagcgacaagatggcattacgaggagacactcaactaaaaaaaaaaaatgagtcaaattgccagactttgtagagaagtaaaaagttaatgctaagatgctctttatgtattagtcttttaacatattcaaggatacgtaaatattctgattatatactaataattaataataaaaaaattgttttgatctacaagatttttatttattttcatgagtaatgtacaaaagacacatcatcacgccttatttttatccaaatgcacatcaatttgcttgtaattatcccacgcaatacgatatataaaacttggattgaacccaccgacgtttgtaatgtagatatcaatattttcaggcggaacataatcggtaatttgattaactgtatctaatctttttcttggatccattctaggtaatatacgttgggacccaccaaattcgacaaacttctctacgtcgaacggatatagaggagaaagcttatacaaacctgcaacagcaaatacaggggttctaaattctcgggcgcattcacaaacggatgatacacctgaatttgacgagatagtccccccattgacaaaaacggctttagtgccgataataaccttacccacacgggacattaaagcaaaaacagctgagtctgggactactagggtttctatgttgtgctgtgctaattttttggcaaactcatgtgcattcttggtgttattagggaacccctctgtaactaaaaccgtaaatgttctattactacgttcgcgagcagtaatcagaaattttaatacggtttttgaatcaggtgtgggagttaataaaatctcatgatcgtgaatcaaatcaatagcaatttgctgaataccttcatcaatgttttttatctcatctataagatccttgataccctgaatggctacttgacggtaatcagtcttggttttcatactagagctccctgaactattttttctattctgatgaggttgctccggtttctgtaataaattaaacatagaggaaatcaaaggttcagcaacggatgtggatgtgacagttgtgctcatagtgtcttcttctacttcatccctcaaaacagccagtattcttctaattacgttaccgcaactgaaagcagtaggatgagctttttctagactattacctaaatctctgatttgttcaataaggtcattaacatggttccaacgagctgcagagataaatcgcattaacagttgtaaagtttccaaggcgatggcgtatgaaccttgcacttgtcttctttttaacttagcaacgaaagtgtcaatggtaacattcacatcagatgttgccgcattcggatgtactgaagtgaatgcttgagaggacatcttatgttgggcaaaagttcgaaagttggcgtgttgtgtttactggttccgcacgagtaatgaatggtctgtttcatttatgaaggttttttctatgtccatttttttttttcagcatcacgaagaaaaaaagcttgcggttgggaagcagaggtatcatatactcaagctgtatagttcaaagcctttcataaaggctattccttagtatatatgataatgggcttgctatgtgtttttgaatctatctaaaatttcttgctatgtagtcgtgtgtagcatagagacatatcaagaaaaggctaaaatatcttcggttatgcaccttattcaccgttatattcggccagatttcttgcagtttctattaaaagggctctaagtttcatatcctctggggctaaagctaaacctctctcgcatgttgccctagcctcttcccactgtctcaattttagcaaacagtccgccttcctgacaaatacgtctggttggataagtcccgtaccaagtaagaaatccaagtcttgcaacgcctctaaatgctttccgagtattaaacataaatctattttactacgaagcataaagtgtagctctggtagctgaatagcaaaagcttcccaaggcgctctttttctttgtgccatttcgattgctaaagaaacattcttcaatgcctcattcaattttttttgttgtaaattcttcataccactttcaaataaacccttgatcattttgcttagagcttcattcggttgtggtgtaaaatttgggttggtttctccaatcaaagatgtagtgagaacatttatttgatcgatattagtttcggtagatagtgcaacaacagcatcactcgcagtgatcagtttactgtttgcattgtattcaagggtaaccatggttgaataagcttgctttggtatgcctttaacgcaagttgaaggagacgtttctttgattttaaggctattggttttatgttcaaagatataatctaattgttacgtgtgctcctacatccgtttgaaacgatccataaacgatctaaaaaatataatattagacaagccaaatacgtttaaatatacttaaatcacagcatattcacattcaactatttgttatatatttaaatctgttttataaaagacaggagtaccagttagtttgtgttttcttgttgcaattataaaatcttcaaaatcatgtggatttttattgaatttctatatcgagatgaatgtaaatatgtatacagtttagggtagggaaaaaagaaagcttgttctcgtttgtcccttataaatcagcatcatcttcatcaggcaatggcaaagcagtagcttgttccatttcttgttggtattgttgcatcaattgttcatcgacttggacttctggtggggctaaagctggagaagcaacaaattctaattgtgggttaccagccaattttctggccaaccataagaaaggcttttcaaagttgtagttggacttggcagaaatatcgtagtattgcaagtttttctttctgtggaaagtgatagtcttggccttgacctttctttctttgacatcgaccttgttaccacacaagacaattgggatgttttcacaaacacggactaaatccctgtgccagtttggaacgttcttgtaagtaattctggaagtaacatcgaacatgatgatggcacattgggcgttaatgtagtaaccgtctcttaaaccaccgaatttttcttggccggcagtatcccagacatcaaatttaatttcaccgaagttggtgtaaaaggataaaggatgcacttcgacaccaatggtggcgatgtacttcttttcgaattcaccggtcaaatgtctcttgacaaaagtggtcttaccagtaccaccatcaccgacaagaactagtttgaatgttggaacttcaccgttagcagctggggcagacatttataatataaatgagtttatttgattttccttttgtactggactaaaaatcgattgagggaaaaatgttgaaggagcagttcttcctgtttaaaaacgaaacaaacttaaaaggtgaggaaaagttgatcatacagttcaaatttttcaaaatcttcgccaaagaaaaaagaaacgaaaattttttttctatctcggtgggatgagctttcgtccagagcgatattatcctaaggtgacgaaccacgcatgtccttcataaacggatcattatttatttaccaaagaagcgtaggtcatacttagaaagtaatagttattgaaataaaagaatagtagtaataggaaagataaagacgtgtctatgtacaattgtattttttgtttaaaaaataaattctgcattttgtgtggctgattacaaagagtgcgtagtgtattttgctttttctttattgtactggattcgaatataaaaagatgagaggaagaaagccaaaaataatgatcttgttcagcttgtggttctgtttgttttttcttcgacaaggaggatgctatgaaaagttcaatgactttctttggtttcctcagcatcatccaaaactagccaatcctcttcaattggctctgactcaccctcttcagactctttagcaacatgagcagtttctacattttgctcggtgtaagcctttaaagcctctgggccttgaagttccaattctggtagatttggtttttgtggtgggttccaaggcttaacattaccttcagcatcttgcaaggtacttggagccagtttggtgtcttttagttccctcaaatacaaatcttgtatgacgttgtaggatattcttgtggtagtgaaatttctattgcacagtctcaatggcagaactgaagcattgagcagtattcttctggaagcgatagggaacattttgattaggactggtacgcagacggttcaagtttgtatggactggtgactggtagatgaacctgtatataagttaacaccccttccttataacatctgagcagtgggtttttttttttttctttgatattgaggacaaaggaagaagttggttggtcgggtaaaagaactacgctttttttatgatgcataattggttcgtgtatggcgatatgagaatcggcaatcaaatacaataccaacatacttgttttacataataacaagcagtctggacaagcttgatagactaataatcttgaatgatgtttaaatgctttttcgaggaaagcggcatttgaagataagcgcaagttctcttacaataagctcgatttcaataaaaacaagtgtgtatgcacaagaggcaacagaacgtcaatgcccagaaaatgaagtatttcggcttttccttccaatgcatttttttttcattagaacgctgatcagctgtgtatagtttaattttattctcattttcattttacaattttaagagccgccgaggcctagaacgagaaatccgtttcccgctttttcttctccttacgtcgtcagattctatatgggcagttctcgcgttattcgtcatcaggcaagtaattatgcccaatcagcttaccaatgtcacataaaggaaccactattatccctttttggtaatgaaaaacaacactcttccggtacgacagccgctgcggcaattacttttccccaaaagctcataatcgatcaattaacgcgtaaacgaaaaacaaaaaaaaaaaaaatacgtaaattaggtcttcatacgagcgtttttttttttttgaggatcgtttgcatgtctagcgcggcaagcgtgtttacaggcattcgttgtgtgttcatgtttagaacaaatgctaagtgataattataactgaatcctactcataacaattgcacaccttgtcgctttcttttactcaagggcgacaaaacgagaacacatcctcgagctatagccgcggggcctgctgactcgaaactcgtcgggctttgcagccataatccagggcagtggccgcatcgttcgggtcgaatggagggctagctacttgtgatttccgaaaaacggactgcaaaaaatgaggaacaatagaacaccgcgcgctttcttttggggctgtctggagaaaccagtgaaaagtgcgcacgcgtattgcggcttaaaaagatacccgtccattcaagaatggccgatttaacagaaaagagtaaagagatgagttttgcgagatcagaaacaaaaacaaaaaggaaaaaaaaaggaaatttttttgggagaaggaaaaaagggttaagtctgtagagaaactccgtagttcccttctgtattactaattggttaccaagtaataaatacctgagagtagtaatatataaaagagaaatcgtataaggaccgtgttaaatttatatatattaaggaagtctttcggttggtagtgtgagataactaattctttttggagagccttcttctttgctctatcgtggtaataatctacatattctcacaatcgcacacgtacgctttctctctcacaagtaacaaattattctttttgcattatagactacgtacgataaaaatataaaaacagaaaatggtcgaaggtgattttgtcgatgagcaatcgaacattgccttactaagctccaaatccatgtgtggtgatcatcatagcgtcaagaatagcataggggatgagatctttaaattattgacaaagattttaaattcggatgagaaagcaagcggagatgtgcacacactcgtttctgggaccccggatctctcaaattttaacctcgataatgaaccactggaaaacatactcgctgttttcataatatcttttattattgtagtggttggagttttactacttgggttgattggcatgatattcatatctctccgttcaggcagcagtaatgataagaaactacagtccaacgatgaagaaaagcaagcacttgctgaaaaagcatgaaataaaaatagatataatagatggcaccgctcttcacgcccgaaagttggacattttaaattttaattctcatgatagtaacgatcgtgcacattcaattaattatcgcataccaaacattttttttcctttttcaattcaactaatctcaattttttaattttcctttttttatttcctttttttttattctcatcataccattttcattcgttgttgatatctctattgttttttttggcaaaatatagtctacatataatatttaataatctaatctgatagcgttaatttccataccgcctccttttatatccgttggcactcgacggtttccgtatgccgtcggaatgcatccgcttcttggactccttgatcgtggtttgcagtatatctacactgtaaaatatagaagtttttggaatggtgttactccattgtgataatatctttgggggttctagcttctttgggttattcaacctaggaaatggattgctctcgcacgtctcatctctggatcttgaagtttgcttgaaggaatggtgtgcagatttttcattggctctttggggtaatttgctggctttaaccaaatctcctatatcaaacctgttagcatccacaaatactttggaatatcctggtgagccatcgtataacaatttcaaggtatctattgaggtttgtgccagttctttttggttcattttcttcacatgcatgatgtgtcttttctccttatttgaaaggcatgtaacttttagcgtctcattttgactactgttttctctttctttcctgcctctttttccaatgtggcgtcttttatgattatgtttattaataatgtctcttgctttgttcctataatagtcagctgttatacgaaggtgattcttaccgaccaagtgcgatttacgaacgctcaacgtgtcatgggtcaaatacgaatgacagtattcacaatagtatctcgtcattgcctatctctttcctctccgttacttgagcaccttcatcgcctacactaggagctcatattatatcttcagtatagcaagaatattttctgttatccttaacgcttacccgcctatgtaccttgacacttgcggaaatctagtgttcaatgataaggtactgtgtggaacatatgaaagtgaaaagagtttgaaccgtttattatctctatacaagtgtctctattcacatataaaagagtgaaaataaaaataacttttaagattttattacctacatgagattagaaaaatcataactatattactcagcggctgtgcctgttgttgatcaaaagaaaagatccgccccttcgaacgtcttagtgccgccttttgcccgcttatcaattttctctgagggaacataacggcatttatctattcgacttccaaatctacatacacgtatatagatacatatatatatgtgtgtgtgcgcctgtgtgtactagcacttctcaatattataattcttccgtaaagttcgatcgtgacttcctgttgcacagttatcttaaataatagaataaaaagctaacgcagattcaagtggggcgttgtcaggcacacaaaaagacaagacaaaaagtagcgtactagacttacagttatgctgttgtgtaatagaaaagtccccaagactttaaatacctgttttatactgcatatattcactctgttaacactgggtgtgttagtgtccggaatgccgtcaaaaatggtatcattcgcctctcaggagactttgcagagaataaataatctccttcgagggtctgccaatcgagatgttgacattattgcagaatatttgaaaaaagacgacgatgatgatggcggcgataaggatcaccataacatcgatattgaccctttacctcgccgtcctagtttaacgcctgataggcaacttctaaaagtcggtttgcatggtgctataagttcagatttagaagtctgtagtaatttgactataaatgaggtactcctgaaatttcccggttctaacgctgcagacgctgcagtaacacaagctctttgtaagggtatggtgaatttttttaatagtgggattggaggtggtggctacgtagttttttctggcaaagacgatgaagatcatctatccattgattttagagaaaaagcacccatggattcacataagttcatgttcgaaaactgctctctatgctcaaaaatagggggtcttgctgtcggtgttccaggtgaattgatgggtctctatcgcctctttaaagaaagaggtagcggccaagttgattggcgtgatctaattgaaccagtcgcaaagctgggaagcgtgggttggcaaataggcgaagcactcggtgccactttagaactttatgaggatgttttcctgacattgaaggaagattggtcgtttgtattgaattctacccatgacggtgttttgaaagaaggcgattggatcaagaggccggcactatctaacatgctaatggaactggctaaaaatggttccgtggccccattttatgaccccgatcactggattgcaaaatccatgattgatactgtcgcaaaatacaatggaataatgaacttgcaggatgtttcatcgtatgatgttcatgttactaaaccactgtccatgaaaattaggaagggcgccaatttcatccctgataacgatatgaccgtattaacaagtagcggctcaagttccggggctgcactacttgcggcgttaaggataatggataatttccagaatcaagaagggggcgattatgaaaaagaaactacctatcatttgcttgaaagcatgaaatggatggcaagcgcaagaagcaggttaggcgattttgaaggcgaagcattacctaagcatatagaagaggtattggatccagaatgggctttgaaagcagtgaaatcaatcaaaagaaactctcaagacggaaattttaaaactttagaaaactggacgctttatgatccggcatacgatatcaataacccgcatggaactgcccacttcagtatagtagattcacatgggaatgctgtttccttgacaaccaccatcaacttgttgttcggttccttagtacacgacccaaaaaccggggtgatcttcaataatgaaatggacgatttcgctcaattcaacaaatctaatagttttgaattggcaccctccatatacaactttcccgagcccgggaaaagacccctatcatccactgcacccactattgtgctgtcagaattaggcatcccagacctcgtggtcggcgcttccggcggctcaagaatcactacgagtgttttacaaacaattgtgaggacgtactggtataacatgcctatattggaaacgatagcctatccacgtatacaccaccagttactgcccgaccgcatagaactggaaagcttccccatgatcggtaaagccgtactaagcactctcaaggaaatgggatatacgatgaaagaagtatttcccaagagcgtagttaatgctatacgcaatgtcaggggagaatggcatgcggtgagtgactattggagaaaaagaggaatctcctccgtatactaagatgtggggtaagaatggtactgtaatatagttcaagataatagtacgtaatgtagggagcctgcttctgtggtatataaataaatactgggcttgcgtttatttttaaagaatcaatatttacttttcattaacaaagggcatacgcccttaaaacaaaacaaaaaatccagatcatgcgagctttgcctttttcagtaagtttccctaccttgcagccgagacgcgacttcggaacgatgccagcatacgtatttaccattattaaaaaaatctgatggcttgatactgcgcgtttctttttatagcattaatacgcacacatacgcgcattgttgtttactataaataaaccgtggggacctgacccagtcatcctccctgtgtttacagtgcggtgcacacgagcctgagacaagcccgtaaccaggcgcgttgccgcaaatacagaggcgccccagacaacaccgcagtgtgaagcactgtcaatttaaaaccgtggcttgctggagatgcccagaccaaccctgttgggtttttctctcgagcacgccgttataattttagcgtgttccgtacctgtgtgcacatcaataagcggtgtaacaaacttgaacttgccatctcatatcgtcatatgagcagttgcagagaaaggcactttaaataaaaaggcgtggatgataaaaaatgtatataagttggatggatttttgggaaaaagtaatgtttttgcagacgttttaaatactccctcccttttcttagtaatttttattatgtattgactaagtcaaaaataactatagaaaactaaagtttacgagaggacccaaaagttttgaataacacgtgcctttgattttttgtttactttctttttctagttaattaccaactaaaatgctttcgcttaaaacgttactgtgtacgttgttgactgtgtcatcagtactcgctaccccagtccctgcaagagacccttcttccattcaatttgttcatgaggagaacaagaaaagatactacgattatgaccacggttccctcggagaaccaatccgtggtgtcaacattggtggttggttacttcttgaaccatacattactccatctttgttcgaggctttccgtacaaatgatgacaacgacgaaggaattcctgtcgacgaatatcacttctgtcaatatttaggtaaggatttggctaaaagccgtttacagagccattggtctactttctaccaagaacaagatttcgctaatattgcttcccaaggtttcaaccttgtcagaattcctatcggttactgggctttccaaactttggacgatgatccttatgttagcggcctacaggaatcttacctagaccaagccatcggttgggctagaaacaacagcttgaaagtttgggttgatttgcatggtgccgctggttcgcagaacgggtttgataactctggtttgagagattcatacaagtttttggaagacagcaatttggccgttactacaaatgtcttgaactacatattgaaaaaatactctgcggaggaatacttggacactgttattggtatcgaattgattaatgagccattgggtcctgttctagacatggataaaatgaagaatgactacttggcacctgcttacgaatacttgagaaacaacatcaagagtgaccaagttatcatcatccatgacgctttccaaccatacaattattgggatgacttcatgactgaaaacgatggctactggggtgtcactatcgaccatcatcactaccaagtctttgcttctgatcaattggaaagatccattgatgaacatattaaagtagcttgtgaatggggtaccggagttttgaatgaatcccactggactgtttgtggtgagtttgctgccgctttgactgattgtacaaaatggttgaatagtgttggcttcggcgctagatacgacggttcttgggtcaatggtgaccaaacatcttcttacattggctcttgtgctaacaacgatgatatagcttactggtctgacgaaagaaaggaaaacacaagacgttatgtggaggcacaactagatgcctttgaaatgagagggggttggattatctggtgttacaagacagaatctagtttggaatgggatgctcaaagattgatgttcaatggtttattccctcaaccattgactgacagaaagtatccaaaccaatgtggcacaatttctaactaagtcgccctcagtccgctcattttagctgaattttctaatgttatttttcatcagcaaaacttaacagaacgttaatttatctaccccttttagttcattatctcttttttatccaacattttacagagatctctcacttaagtctaagtaaagacattattttatatggtacacttatagaatatacgataataataataaaaactatgtaacataaccttcagaatttaatattagtttcctttttacctcattgcactaataaaaaaattctacagaatctccgaaaaagaaaatccagcttactctttttgttttcttcttcacacgtgagcttttccgccggcatacgttccgttccgtgtcgtcttgcataaaatttccgaatcacatgttcgtaaaacaaccggaagtgccccgaatataaagtcaattctcaccgctgttgtaactggagctttaaggtgttatctaaggaaggataaaagaacttaaacaacaacaaacaaaaaattaagttacaatgccagcattattaaaaagattattgtttcaagtgggtcctcatccaaacgaaagaacattcaccttatcctctgtttcaactgatgggcactatatttccttgagaccatttgttaagccaagcggtgatgagttatcttttcctttcgaatgggcctttgccggtacaaacgaaacagttaaagctaatgatcaaggaaacggtgtcgttactcaagatttcaatttctggttggatacaaatgtgtacttgaacgttccaaacacccatcgtggcgaagtgaacaccacttggaaaaattgggattctggttgtgtcgaggaaacaggcgctgtttacccattcggtgccgacaaagaaagcgtctctttcagagaattgtggcaaccagttgacccatcaagagaagatctagtcatcgtctcaccaaacaatgagaagttctcgtcgaatgctaggtcaattgtcctcaaagttactgacgaagcttatgatggtttggttattgttattggtagatggattcaagggtttttgtcccaaaagaataataacactattgaaggcttgaacttcatcagattacttgaaaaagattcaggtaaatctgagttcttattaagctacggtaaggaagtaaacaaaattccacaaagctacgaaaatttgaagaaaggttccactgtaaccagcaatgggttgaactgggaagttattgaatatcacgcttaataaaggagaataaatcgttttctactttcttctgctgctataataagcacctatgggatctatatagtatttttataacgatagactttataaaagaaaatacctaagtgaaaatttggtgaattttgagataattgttgggattccatttttaataaggcaataatattaggtatgtagaatatactagaagttctcctcgaggatttaggaatccataaaagggaatctgcaattctacacaattctataaatattattatcatcgttttatatgttaatattcattgatcctattacattatcaatccttgcgtttcagcttccactaatttagatgactatttctcatcatttgcgtcatcttctaacaccgtatatgataatatactagtaacgtaaatactagttagtagatgatagttgatttttattccaacactaagaaataatttcgccatttcttgaatgtatttaaagatatttaatgctataatagacatttaaatccaattcttccaacatacaatgggagtttggccgagtggtttaaggcgtcagatttaggtggatttaacctctaaaatctctgatatcttcggatgcaagggttcgaatcccttagctctcattattttttgctttttctcttgaggtcacatgatcgcaaaatggcaaatggcacgtgaagctgtcgatattggggaactgtggtggttggcaaatgactaattaagttagtcaaggcgccatcctcatgaaaactgtgtaacataataaccgaagtgtcgaaaaggtggcaccttgtccaattgaacacgctcgatgaaaaaaataagatatatataaggttaagtaaagcgtctgttagaaaggaagtttttcctttttcttgctctcttgtcttttcatctactatttccttcgtgtaatacagggtcgtcagatacatagatacaattctattacccccatccatacaatgccatctcatttcgatactgttcaactacacgccggccaagagaaccctggtgacaatgctcacagatccagagctgtaccaatttacgccaccacttcttatgttttcgaaaactctaagcatggttcgcaattgtttggtctagaagttccaggttacgtctattcccgtttccaaaacccaaccagtaatgttttggaagaaagaattgctgctttagaaggtggtgctgctgctttggctgtttcctccggtcaagccgctcaaacccttgccatccaaggtttggcacacactggtgacaacatcgtttccacttcttacttatacggtggtacttataaccagttcaaaatctcgttcaaaagatttggtatcgaggctagatttgttgaaggtgacaatccagaagaattcgaaaaggtctttgatgaaagaaccaaggctgtttatttggaaaccattggtaatccaaagtacaatgttccggattttgaaaaaattgttgcaattgctcacaaacacggtattccagttgtcgttgacaacacatttggtgccggtggttacttctgtcagccaattaaatacggtgctgatattgtaacacattctgctaccaaatggattggtggtcatggtactactatcggtggtattattgttgactctggtaagttcccatggaaggactacccagaaaagttccctcaattctctcaacctgccgaaggatatcacggtactatctacaatgaagcctacggtaacttggcatacatcgttcatgttagaactgaactattaagagatttgggtccattgatgaacccatttgcctctttcttgctactacaaggtgttgaaacattatctttgagagctgaaagacacggtgaaaatgcattgaagttagccaaatggttagaacaatccccatacgtatcttgggtttcataccctggtttagcatctcattctcatcatgaaaatgctaagaagtatctatctaacggtttcggtggtgtcttatctttcggtgtaaaagacttaccaaatgccgacaaggaaactgacccattcaaactttctggtgctcaagttgttgacaatttaaagcttgcctctaacttggccaatgttggtgatgccaagaccttagtcattgctccatacttcactacccacaaacaattaaatgacaaagaaaagttggcatctggtgttaccaaggacttaattcgtgtctctgttggtatcgaatttattgatgacattattgcagacttccagcaatcttttgaaactgttttcgctggccaaaaaccatgagtgtgcgtaatgagttgtaaaattatgtataaacctactttctctcacaagtactatacttttataaaacgaactttattgaaatgaatatcctttttttcccttgttacatgtcgtgactcgtactttgaacctaaattgttctaacatcaaagaacagtgttaattcgcagtcgagaagaaaaatatggtgaacaagactcatctacttcatgagactactttacgcctcctataaagctgtcacactggataaatttattgtaggaccaagttacaaaagaggatgatggaggtttctttacaataaagaagcacatgtgtgttaacgtttttagtatttgcttgttatgtaaatcaggaaaacttcgcgggatttggttggatgctactttccatacaataaatattatagatctaaaaagccaaattacaagtaaagattagtaaagctgttggaattccatcgttgataaaaatgttagttattaaatataaaagtcagaataggtgaacttggatttaattgttggcatttcgttgctgctagaggccataatattagatagccaggacatactagttctcctcgtggtataggaatccataaaatggaattggtgattctatgtgatatattcacattcttactacattatcaatccttgcacttcagcttcctctaacctcgatgacatcttctcataacttatgtcatcatctaacgccgtctattataatatattgatagtataagtattagttgatagacaatagtggatttttattccaacagtgtctttgttcgtctcagatatagtcggattgcccttttaagcaatcaatagtgttttatttgcaacaatgtcgtcatagtttaatatgtcctataagatgttaacttgctcaacattcaacaaagtttggtctcttggcccagttggttaaggcaccgtgctaataacgcggggatcagcggttcgatcccgctagagaccatttatttttaaattcgaccgtctgacagacggtgcacttattacttaatttttttttttttttaatcctcgttaaactgagtacataatcagcaacaatataatataaaagttttgcttttttatgtacgtacaataggggtacttaaataaataaataaacaataaaacaatcaataaataaataatatacgatcataaattacgagatatatttcatagtcttgacttctccagccgaacgtcattaaatttaaggcagaaaagataaacaagggtacggtgtacagaagacaaaataaataataacctttaaaagattataacaatgttttcattatttcttctcatcggccttaattttatttaaggcagaaccatatttgaaccattcaatttgctcatcgttgaaagtatgggtcaacacagcatcccatggcttaccattctttggatgaactctcattgttacaggcttacctggagccaattcagctagacccagaatatcgattctgtcatcagggttgatcttgtcatagtcagctgggttcttgaagttcaatggcaatagaccttgttttttcaagttagtttcatggatacgagcgaaagactttgtgatgatagcgaaaccgcccaagaatcttggttccaaagcagcgtgttcacgagaggaaccttcaccaaagttttcatcaccaataacaacccacttgataccttggtctctgtaatctctagcagtgtctggaacacctttgtattcaccagtatatacatttttaacacagttagccttcttgttttcagcattaatagcaccaatcatatagttattagaaatgttttctaaatgacctctgtatttcaaccatggaccagccatagaaatatgatcagtagttgtcttaccgacggccttaatcaagattggcatgtctttagcatccttaccatcccaaggtttgaatggtttcaacagttgtagacggtctgaagttggagaaactttaacttcaacggtgctacggtctgcaggtggagcttggtaagtgttctcaccagcatcataacctctttgaggcaaaccatcaccatgtggtggtttcaacatgaactcattaccatccttgtcctttaatttgtctgttagagggttgaatctcaaatcacccgcaatggcgaacgcagttactaattctggagatgcaacaaaagcatgagtttgtgggttaccatcatttctagaagtgaaatttctgttgtaagaggaaacgatagtattcttgtcacctttcttgatatctctacgatcccattgaccaatacatgggccacaggcgtttgccaaaacgataccaccaaattctttgaaggtttctaattggccatcacgttcaatagtggctctgatttgttcagaacctggagtaacagtgaaaatggtcttggatttcaaaccatgagcagcagcatccttgacaatggatgctgaacgagacatatcttcataagaggaattggtacaagaaccgatcaaaccgactctgacatccaatggccagttattagcaacagcaacttccttcatcttagaaactggagtagccaaatcgggggtaaatggcccattgatgtatggttccagagtgttcaagtcaatttcgacgacctcatcgtattcagcatccttatcagcagataataggtccttgtggtataatttagcaaagtcagcgatcttaccacgaccagttgcttccaaatattcaatcatagatttgttgaatgggaaaacagatgtggtagcaccgatttcagcacccatattacaaatggtacccataccagtagcggagaaggtgtcaacaccatcaccgaaatattcaacaattttaccagtaccacctttgacagttgtgataccagccaatttcaaaataatatcctttggagaagtccaaccgttcatcttaccagtcaacttaacacctaagatctttggagccttcaattcccatggacgacctgccataacatcaacggcatcagcaccaccaacaccaatagccaattgacctaaaccaccagcatttggtgtatgggagtcagtaccaatgatcaaagcacctgggaaagcgtagttttccagaacaatttggtgaatgataccggaacctggcttccagaaacccatgttatatttcgcagtggcagaggccaagaaatcataaacttccttgtttagatctatagctctcttcaaatctttttcaccaccaacttgtgcttgaatcaaatggtcacagtggacagtgactggcttagcaacctgtggtaaaccagcggacataaattgtaaaatagccatttgagcagtagcatcttgacaggcaacacgatctggtcttaattttaggtatgaaacacctctctgaatatcttgaccatgagggtcatccaagtgaccgtacaaaatcttttccgcgtaggtaaatggcctgtttaatctttttcttacgatatccagcgtttccacattctgcttgtagttaataaaagaatgatcttctaataagttttggttgacttttgaatctctagtcaagttggagactgtcgcaagaccacgaacaatgggtctcttgatggcagaacgtgcagacagcattgtatatctatagtaataatggtagtatttattaccttcgttctactatgtaataactaagaaagagtgaacagaacaagggacaacggaattaagcaacatactcctcctaattaacctctaaaaccggaagattatatatataacaaaagattttccttgtcctccctttttgtgcttgcctttccgaaaaccggcagcgattggaggtttgatggttaaagtcgcctgcggagaacaactgaagggttcaaatttttctcgtatgcactaatttctctattgattggtcaggacctttgccgatttcggcgccgaaatgctcgaaaaacaaagggtattgcccggccccgcggacctcccttttgcggctctcggccattttttaggtaatttgacaccgtgcccaaatggcttggcacaatcgagaatcaggcacccgcgtgtgaccggcgtcattcattaaagccagataagacaaagtaaaatacaatggattatgattaatacaatgatatacaaaaagagagaaaataaacgaaggctacgtctgcgtaattgacgatgggaaactggtatttttatataagcatatgtaaagtgcgaagtatatcagtacggaatgccatttgtgagcctttggaattcatcataacctttagtgaatatactttcataacttttacggattagcgccttcatatatagtgcagcttcgtgatcggttttttgaggttgaaatcttgctcttagattcctaattgtcttgtgacccttaaagcaggggagaccgcttcctaacataggatttacacactcaattatggcctccacgtgcggacgggcggctagatatgccttgatacaaagttcttcaaagtccagatacgctggggtctggggcgaacctcccatcactttaaccatttctttcgtcagcttgaatggtactgcttcaaacttgataccacctgggacaatatcaaaaataaacccaaaatcgatatgtagacaatgtccttgatcatcgtacataatgttaccattatgtctatccttgaattgcaacaaatacgaaattacgctatatcccgctaaggatttaacaaagttgtttcgtgcgttttgaaattcgatagtagattcattaccaaatttactagtgaaatattcatataatccattaacagcttcacgtcctaacatatcacgggataccgaattgggtagcacatcgatgacaccacaacccggtgccgtcgcagtaactctgtagggaaaaacgtagacatccaagccaatactagaccaaatggttctaaatagcgagatcaattgtaacgctagaacatcttgcctacagtcatcaccgactttgaagatagcagcttgccatttttcaacttccttgtttttacctgtcaaaggatcttttacgtctttctttattttaaaggtcgccataaaaggcgcctttgcgtgagattgaagtggcttaccactcttccgatcaatatcaataactacaccgtcaggattagaaggtaaataaacatcaggtttcacctcaattttgctcatttcttcatcgatcttatgtttcttttcagccttacttttttttatgtatggtttcaacttaccagatatgccagttacttcgtcgaagaattcaaattcacgttcgtaaaaatcgcgatgagattggctgaaacttgaaaccatacgctccctaatacgatctagagttggtttgatttcatcttcttgtataccttcatcatccttgtagcagtttgcaagcatattccagattatttgatgagaaaataacacactaattttcgcagtatccaaaatcaatctttcgacatatccggttttatcgtatctcaaacattgtacgatttgaggaacatagaagaatgccaagttcacatcttgtgattccaacgaatatatgctgaattgtaagataaaagaattaccttgccattcgggaaggaaaaggttgatagattttaacgggctcactggcgcccagtataaggttgcgtgtaggtctttcttactgctcaggtggcttccttttatgaacaggtcaagagcacttggggaccccacacacattaaagcatgttttgcaactaagcccactaaaacatcctcagctttcttgctataacatcgttgtaagagatttattgctaatgttggatctttagcaaaggtagcttcaacgatatcgcttgtaagctcgttgctgtcggctccttcaatcttctcagtcggagtaagccaggtttgaatctgctggatttcgcttgccaagaaatagttcaggatcttgtaatctttcccgcaatgacgtgacattagcgagcttaatttgttgagctgaaggaaaaggtccctagtaacagataaatctgctttgattttcagctcatttgagccgaatggccacgctactggtcttttaaaccaacttagggcaccgtttgtgatttcttgcgacaaacggcccatatacttggatccctgcttataacttgcgtttagtacgagagtcgcgaataacaataattcgtggcgaatcattctagcgaacgggtgtagtgaagccttatacagattcttgataccataaagcgcacatttcgtgaaaattttcaataaaaagtcactttgaaatagtgtgccctcgaaatgggaagcaaaaaatttaataacatgaagatgtggttgcatagcttgggatgcattttttgcatctctgttgatacctgctttgtcgtaaggggaatattccattttttggtattcttcgccctttaagtcatgatcgcgagaatagagaccaatattgtcatcaatggagcgcatccagcaatagcatacttcaactaaaagcaaatgtgcaacttcgggcttctcagttatgattgttaaccatacgtttgtagcaatctttaaagatgcagaggtgaagacttcgaacgggatgtgcacaatatcatatatcaatgacgctggtgcaccattgccaagaattaacaacgcggtagccatatcaagaaaatcagttacgtctttagttataatcttatttcctaaggtcaaattttttcttatgttttgagtggaaatacctatttgccttttgatatcctctggtgatgatgtaatagcggtatcgaaaagatattttgacctccaagaatgtaaagatataaatccagaaatcgtgttaggtttctctggaccataataagtaagccttgataattccttatctgcaggtaaaatcaaaccagccatatccatggcaaatgagacaccaaattcaacagaatttagcctgctgtactcaccgagatctgatatgtatgattgcaacaaaatcttagtatcctggttgcttctattcaatagaattcttacccattctttagctgacttgtgcaatcttgatagtgtcgtagcgcgccaggacgatgagcttggaaccaatattgttgtcttagaatgttttaatttaaattcataccgtggttcaaatttatgcgcctctgagtccaagatactatcaaatagggctgttaacatatctaataaggtgtagagagacaaatgatgacataacgatgatggaatagatctgataaatatttcacaggcatgaaaagcggcatcctgcaaagttggttccctatgagaaaggcaaagtagcaagttattaagttgttgagcaatcattttggagttgaatatggcatcgttacccttttgaatcaacctagcatattttctaatcatggaaaccgacaaaactgcaatacacttctcaattgaaccggaaagaatggaggggtctgagaagtacagtagagtcttcgaacaatcacctgcctcgcatcttatcgtttctagaagaacggcagccgctaaaaacatgattttagacgatgaagttgttctgtactgaacaatattggtattgaaatattcggttatctgctgtttttgttgtttgatattttcgttagatgaaccgcggcgcaaaattgtattcatttccaatgaaagctccttgttattagcaggaaattcagaagccagcggtggtgaattataggcaatagttaataagaaagaaaaatttcgtttgacaataggcccgcccaagtggtacccatggatgacaaaattaaaccaggcgttcctaaacttgtttgtagtgacttcatccttattgatgtccaatggcgtatcgcctggaacaggtagtagagcggcgaggggctctaagtaggtagcgatttgatcagcaacacgggaaatctccgtttgaggtctgtgatgttccaatcgttctacttccccactggcaatgattgagtccaatagatcatgaagatacatgaaatataagtcacttgaaaaatgcctggccaacaattcttttgatatcacacatttcgctttaataatatttttcaatagtgcgctatcatcaatttttgttgcaataacagttctcgatttgaagaactttagtaaaagcgaaaattctgtcagtgaagtattcggagccagtcttgccaaagaattcaaaataacaccgtctaattcctttgacatagaattaactttttgcgtaagaatagagatagtcaaagctgttatgctttgggtgttatagtatgaggcgattgtagtcgttgcagccacacaattagatatcaaagaggcatggtatgtcatagtagctccactattgacatcatgggaggaaagttggcccacagttgtatttccgagcagagcaccagtgccatccaaactggcagatgaatttcgcaagggaaagtagtctttctcaatattttttccagatgttattgttaattggcgctcacggagcaccgggacgggcgatccgtcctcggaaacagctaataagttgttcatggaataaattgtactcacaattgcatcttcatttagagggtataaccctgtggtgaatatttttgcaacatcattaactgtttcagtcgtgatatgtggagacgctaccaataaaggaaacatacgaatcagagttaatgacaatttttccgtgaaaaaattcagtaatgaggcagaagctacaattgcttttatcaaagatggtgtaacgacatcagataagaaaaatttatcaatagattcagaaacaacgtttgtaaaactttcaaaaagctcgctttctgtatcttctataaacggaattaaacatagcgtttgtaggtagtgggctcgagtatcaaaagaaaatcttgcacggttgtctgtagataggtcgagaatatgtgactcagaacaaaattgcagggaaattttacacatgtctgtaaaaaactgtttattgcttcttacgttgaaaaaaaagtcatcaatacacttcgtatcatcgttttcatcggctacttcttgatcaaatttgtaaaattggtattgttgatttagtaagaactcactcaagttggcgccgacatgtgaagtgtttaacagatgagatattagcgaaacttgcaagcgagatattaattccaataagtaggcactggatagctcatttccagcatcgtaatactggacgattgaatcattggtaaacgttgctgaggaattcaaaatcttatcaacttcgtttagaaatgatccacgaagcacaagtttcgctaactttttccaggtgaatttagtaagctctgtagagttgggaaactggataaatgcattaataaagcccactaatgatagtagaccagattgtttaatagtaaaaatctttaatacacgctcaaaataagttgaaatgatgccgcctatattttcataaagaacgggatactgttcacaagcttgaatcataaacttagtcagctggaaagttagcaattcaatcggatttctcatctgttccaacttgaatttcgaggacagaacatctgaaattctttgtcttggagtttccagaaaataaggcgcaattatttctttaagcattgtctctaccagatcgagcgtggtagggattgcaacacaaagcgaagttagtacttcccattcactcaatgtaagtggtatagtatatatctttgacgtatttgtggaataaaaaataggcaatgtatgagttatcaaatctaatgttgtaccattactgttttgatcatttggtgcacccgtcgaaagtttagttagtcttccaatagctttcgctcttaaagatgaagaggctttcaatcctctggtaaatctcatctgccttaaacgagtggcgttttcgattgctgtagttatctttttgtgatctaatttttttcttgatttacaatagttattaatgttgaatatgttttttcccacaactcaaacatcttcgcagtattcttgaaaaaaaaaaatactattaacgtaccttcatccctgcgcgtgccgtttgatgatatcagccaaaaggtaaaatgagatgaaaaaggccaatcattcataaatgtacttagagacattaaagaatcagttagagaatataaaacaagataataaaaatggtacgtagatgcaactatatctttccgtttctcattggcggtttttagcgatcgaaaatactaacataatctttttggggggtgagaatgtatatgtgtactggatatgtatattcttggctttattcaaatagttgaaattacgccaattacaaaagaaaaagcaaaaagaaaatgaaaacagcagttctattcagcctaatttatcggcagcaagaattcgtttgaaaagggaccttgattcgctggacctcccaccaacagtgactttgaatgtaataacatcaccagatagtgcggatagatcacaatcgccgaaattggaggtaattgttaggcctgatgaaggatattataattatggatctattaatttcaatttggattttaacgaagtttatccgattgaaccaccaaaagttgtatgtttgaagaagatctttcatccaaatatcgatttaaaggggaacgtttgcctaaatattcttcgagaagactggtcgccagctctagatttgcagagtattataaccgggcttcttttcttgttcttggagcctaatcccaatgacccgttaaacaaggatgcagcaaagttactgtgtgagggtgagaaagaatttgctgaagctgtgagattgaccatgtctggaggttcaattgaacatgtcaaatatgataacatagtttctccttgagtcaagttcagagtaattttcggttgatttgattatatataaacaataaaattatagataattgtgacatactaggcgagttgtcgccttggtaacatcttgctaccgccatcttctgttagtttacgccttatgaccaacattccttatattctcgttcaaacttttgtctcgatattttgcaggtacctgtagaacttaatgtgttctattcaaaataagtataaaatttctggccagtaaaggcaaacaaaacataaagatattaatacgaaaaatttcttgaagaaaacaaaaaatacttcttataataaagaaacagcgaagccatggctattgacaagataatcaggaaggtgagataccctggatagaagactaagagagagcaggaagttgaagaacgcaatctcagctatcgctaattcttacaaaaaataaagatattacaactatggaagaaaaaaatgaatgactatactagttagtaatatttaacaagataacgctttctattttctgtaaaaaaaattctgtctcatgcacttggaagcagcttcaacatttctcttttccagatgtcacattttccggaccggccgtcattcaatcgcaattaaaagagaaaaataccaacaagtgggttgatttacttttgtgttttcaaaaagaccaatagttctaacaaagtagatgcttagaagtaagcaaagtggaatatagagaaacaaaattaagtgatagatttacttttacacaagaaaagagatgaaaattttcaatacaatacaatctgtgctgttcgcagcattttttctaaaacagggaaattgccttgcgtcaaatgggagtaccgcattgatgggggaagtagatatgcaaacgccctttccagagtggttaacagaatttactaatcttacacaatggcctggaattgacccaccttatattccgctagattacataaatcttactgaagtgccagaattagataggtactatcctggccagtgtcccaaaatttctagagagcagtgctcatttgactgctataactgcatcgatgttgatgatgtaacttcgtgtttcaaactttcccaaacatttgacgacggtccggccccggcgacagaggcattgctcaagaaattgagacaaagaaccactttttttgttctggggataaacactgttaattatcctgatatatatgagcatattttagagaggggtcatttgattggtacacacacgtggtcacatgaattcttgccaagtttatcaaacgaagaaattgtagcccaaattgaatggtcaatttgggctatgaatgccacaggcaaacatttccccaagtattttaggcctccatacggtgcaattgataatagggttagagctatagtaaaacagtttggcctaacggttgtcttgtgggatctcgatacttttgattggaaattaatcactaatgatgatttcagaacagaggaagaaatacttatggacataaatacttggaagggaaaacggaaaggtttgatcttagagcacgatggtgcacgaagaacagttgaggttgctattaaaatcaacgaacttattggtagtgaccaattgacaattgcagaatgtattggtgatacagactacatcgaacgctacgactagaagtaagatttccgagaaataaagtttctctctatatatctttgatctcttatttaattattcaactcgcaaaaataaaaagaatattttgttatttcaaaagtaaaaaagtatgtattagaatagaggacatatataaaaatcatatatatcgatgcttgaatgtataaggaaaagcgtcaaattatgaacggtaggtacttaggatgctgatgtcacataaagtcagagggtataactttaaaaagtaattttttagaatcttttagcgtcaaaacgttacacgtacatttgaacagtgttaagagtagattaattcaaattatacttttacgtgctccgatacagtctctacctcttcgttgtcagtgcaaataacaattggcttatcatgaactgttcttggagatggagaatatcctttcagactcgtaatattgatgacggtagttattctgcgacattgagtagtactagcatcccttataaccggaatagttgttgatgtaggtgaactttttgggacataacacttggcagttgtttgcaaattttttgtgatcattgatatgtttcttagtgacatttttgatgctattgtttttatagtgtaattgctatgagtttattttgttgacaagtatacttggctgtcttttttatataataacgaaaatgtgtagtggaaaagcaggtgtgttttgtcttatatcttacaaactatataggcttatatagttttttttcaaagattcttattactgcacaaaaaaaaataagatcccaaattgaacattaacattagtcatattcagggatggctcatcacgaacagcaaactgaataattttcttgtctgcgttcctttttttgtgcaccaatggatgtagtatgcgcacctgatgcgcataatagattgcaattacactgactacaacttacgtatatgcgtttttattacttttctattgcaacggcctaaaggaattcgataaaagaaagagtaggcaagataagcctgaatttggctttcggctgttatttttacttccgctaaattttctttgttcttccattgtttttttgcctttgtgttctccattaatccatccaattttaatgtcggattaatggaactttctattaacccataaatgccacatagtacggctgtagcagtgaaggttacaaaaggacgggtaacacatgagaaacatgcgtcagggaacaaactagatatttgattttgtgacgcaacgcaaaaattactggctattcttttgtagtattatcaaaatccatttaaaatattctctctccttcagtaatcctctattatttatcaaaaacccacagtgggtaaacaaactgcaaaagagttgttattatttctacggatcggcaattgaaaatgagaatacaactaaatacaattgatttgcaatgtattattgcactttcctgtctggggcaatttgttcacgcggaagctaatagggaagatttaaagcagatagactttcaatttcctgtattggaaagggcagctacaaaaacgccttttccggattggcttagtgcatttaccgggttaaaagaatggcctgggttagatccaccttatatacctttagatttcattgatttcagtcaaattccagattataaggaatatgatcaaaaccattgcgacagtgttccaagggactcgtgctctttcgattgccatcactgcaccgaacacgatgatgtgtacacatgttccaaactttcccagacatttgacgatggtccttctgcttccactactaaattattggaccggttgaagcataattccaccttcttcaatttaggtgtcaatatagttcaacatccagatatctatcaaagaatgcaaaaggagggacacttaatcggctcacatacctggtctcacgtatatttgccaaatgtatcgaatgaaaaaattatagctcaaattgaatggtccatctgggcgatgaatgctactggcaaccatacccccaaatggttcagacctccatatggcggaatagataatagagtaagagcaataacaaggcaatttggcttacaagccgtcttatgggatcacgatacttttgattggagcctccttctcaatgattctgtcataactgaacaagaaattcttcaaaatgtaataaactggaacaagtcaggaaccggattaatattagaacacgattcaacggaaaaaactgtcgatcttgccattaaaataaataagttgataggtgatgatcaatcaacagtttctcattgtgtcggcggaattgattacataaaagaattcttgtcctaattttcagggaattgaagaaaataaggaagaattaaattacaatttaaaaagaaattgctttagtattttatatatagacatgcagcaacttcttgatatatttcaggaagaaaaaaactgtttcaatatatacgtatcttctgctttcagctacatttttacttcagagacataaccagtcttttttcatcagtactgtccagttgtaacaacatagaaattacaggaagtaattggttccgttgttccttgtgctccaaaaatcccaacaaaacattttttatatatgcaattttttcatttttctcagagtctaactccaatgaacttgatgatcgtatcttctctaatttagttggattagagttattcgctggtgaggaatcaatattcgcgttagctagagtaccgatagaaccagacctactaactcttcctgacttgtcactgtattgtctttcctttaaagcattcaattgagaggacaatgaacgataattttttagtaatcgatcaaatttcttgttaagttcgttatttaaattcagaagtttctcattggcagactgtagctcaaaattcttttcatcagccttagacaatgagagttttaaattagatgtgatctgttccaactgatcggaatcatctgaagtggcttgagtcttccttttgatgtcattgttaacatgtttcaatgcgtcaacctctgattttagtccctcttcacgaagctttaaagcgtgtatttccgatttcagctcagttactgtatgcttccactcttgtaattcagtggcctttctggatgtttgtaagtctaattctgcttccaatttattcttttcatccgttaaataggccaatttattctccaactctttttgtttgctcgaatcatctgtctgactgtccgaaactaaccttctcaatgtgttagcttctctggttttgtcttgaacaatattagcatattcatttagttcatcttctaaagataaaattttttttgtagattccttcaacttgacatttagttcctcacattgtcttttgatagaatctatgtgttcattcgaattactttttacattttgcaaggtattgtatttttcttgcaaaatattcaatctttccgataatttaccattttctttcaaatactcctcgtaggaattagaattctttgcgatatcattatgcagtgtctcattttccttttttaataagtctaatctgttagaaattttagcatgatcttttctcagctgttctgtggatttttcagccacgtccttttgctcactaaattgtttaacttgttcctccaagtaactcacagttttctccttttgtttataagaggttcttaaagaagtaagctcctttgttatgtttgatttttcgtaggtaagttgagatatctcctcatttaatttggctaccttgttctgcgatgtagtctgctctttctccttttctgtacataaattcttcagatgctctactttcttgctcaataactctatcttacttctcaactcagtatttttagcttcgtaggcctcgatcatcgttgcatttttatggcgtaaatcatcgagctccagcttaacggttttcacttcttcattttgtttactcgaagactctttaatctcatcttttgcgtccacaagctcattgcctacagtcctcagcatatctctcacctcctctagctccgaatttttttctttcaatgacttcttggtatcgatcaactcggtgttaagggtttccagctcctttgctgatttttcgagctgtgagttttccaattctttagcatcttttagttctgcttctatatcttcatacttttgcttccaatcttcacaatctttatatttttcttgtaattcttgcaaattttctttaagcttatcatattcttcagtattgattgagttatcgaccgtttcctcttcactgatatcacccgtagttatgcctcccttatttttctttcccttgtttctattctttttccttctgttattgtttcctacattttgatgagatatcgccttcggtaactccttcatttttttttccaattcactcagcttgcgctctttctcttttaaagtaatatttagttctgccaactctgaggacttttcctccattatagtacttttcgaagacaaattttgctccaattcggttatcttcattcgactgtcctcgagagaatggttctttatagccaattcttccttcagttcggatatagatacttcttctttctgttttttggcctccctttcttcctttagtatattttccagtgcaactattttttctctcaaacctgaaacagtatcatttttttctttttgtacagtatccaattctatgtttaaagcttccatttttttttttagatcgtctatgtcatttttataattttgctcttttttcaaaaattcctcttctttatccttcagagtttcactagaggcgctttctggaatttccgagttctgcttagttaatctcttgatctcatcattcaataggttatttttgttgtttaaatcctggaaaaaagctggcaacgtatccactgcgtcgtcaatattagatatgggtgtattttccgctaaaatcttttcaacagcctctaacttctctgactttaatttttcatttttgtatgcggagagtagcaaagggtatttttgttcatatttctcaaattttcttaatttagcttgtatttcttttggcaagccactcttatcatcttcgatttgttgttctgacggggtagggctcatatcatcggctaagcccttcgctaattcatcggtaagattcttaccaatttgtgacagctgtttgaacattgaatcagcaaatgtttccctaagttaaaatcacctcaaatgtaactcctgttgcttactatttgacgtttctgctacatttggttctcttatattgctggatctgaaaatccgaactatgagaatgcgggtaatagcttttcatagaatcactaattgatattttttcaggtaataagtttcctctaatcgggcatttaaaatcttggatcgataacttaactgggtgtaataaaatatataaagatataaaatagatatatatatataaaacgaactttatcaagaagaactgcaaatgaagcgtactctcaaatcctcgaaaacgaaaaacactccaccagtacagtattatcacgaagaatattaagtaaaagcagccatcttaaataatagagtgtagcaatcaaacataaagctaaggttcttcttgattagcaaattgtataaacttttatcgaaataacctagaaggaggttttttcttacctagcttcaaaaaattgccatttttatcatctgtaaattcacttaggaattttgcagtttttgtaccgctagcagaagaagcatgcgtactgcctttggtgtttcctgatctcggttccacttgcagtgataattgatactgcttttcaatgtgggggacattttccaaagacgcttctataacggtctgaatatcatccaatcgtttcagcttgtaatggaatcttttaaagcttataatttcctccactatatttgcgattttagtcctcttgctgaagtttattatgttggttgaattgtgaagaaaatctgggtttccgacaaacgtaaatgttaaatcagataggtatacaccaaaaaagggaacacatgcaacgtccgtcacggatcgcaacagctctctatacttcacaaaatttctcttggaatccataaggttgtttaggttcttcagaaggtccttcgactcagtggaaactaaatcccatgtctttttcagtcggtagattggggaggaatacaaagcggacactatggcagtcattgaagaaaaattattcaactctttacaatgctgggcaacggtaacaaaatattgcgttaattttgaacgtgtcttgacatctgcctgttttacaatggtatgagaaacaaaattagttagcgtattagcattagctataaatttcgtaatgttcggagaaccacccatattacaatacttggtaccccatgccctatccaagcattcaaacatagtgatcctgaggtataagtcatgttcaagtacagtcaattgtgtggcatatgtgtatgggtcaatatccaagagcttcaatttcttcaatctaaaaaacgctgaagaagcagaagatggtaaagaagacgaagacatgtgtatcggtgatttattgtcacgtttagttgtctgtacgactgccgataccgaatcttgttgcttaggatccactggttctttctcattctcatttatcagtttttcatttatcttttgcaaaagatcctctgcccccggtattttctccgatacaaccatcttggcaaaatttagaatcagtggtatgccaggttcataataatttcttgtccaatactgcgtcaaaaatgttctcataatgttgaccacacggcatttaatcgggtttgactttttttctatccaaatattgtaatcatcgtaactcagcccttcaggaggatacaagttgtacctgtaaatcagggcataaaaaaactctcttgtggttaatatacttctgaaagttattaacattgtaacattgaaagccgcatcaacaagttcatgactggttaaatgttcaatcagtgcctcttttgtcccgccacgaatttttcctcttgagtcatagacaagactagtttcataatctgaagttaaaaaccatggaaggtttttctctatgttcgcagctttgcgttcaatatagtcctcagatcctaattcgtcatcgatgatagcttcatcattttctgaatcgtcatcactatagtcctcggaataaatatcaaaccatttttcttgctcacctttcaatagttctgcagtcaaattattcttcatcattcttgctgcgtagttcagcaaattttctctttcttcaatcaattgatcaacaataatacacgcaagattagaaatctcgacatacttttcacaagcatctttaaaatcgtcggagttgtttaaaaattcaaggttattgaactccacatcttgactcaccaatacgtgaaataaggagagtgccaattgttcattttttttatggaaggggcccttgaccaaaggtgtattagagatattcttgaaaggttcatgatgtccgacagggaaattggacctcattgaggaaaacaaatacgggtcgtctaaggtcgtttgttgcgttgtcattattaatctgatgacgatgtcatgaaaagcctgctttatatcaaaaaactctgttagtactgaggagaccgaagacatggcgtgaactaaaaattcctcgctttccaaatccaacaaaatactgggtgtcttaatcaggtttttcaaattgatgaaaattgacagatctaaattctccagtatctccaatagtaaaacattctgatttatttgttcgtatgtgcttgaatttatttccaaattcctaattctgcttttgggtttacttataatttttaagtgttcacctgtagcattatttaatttttcaaaaatttgcgaggatttcttcttcattgtattcaaagtgtctacagttaatggatattttttcttcctttttgaaactcttgctcttgaaaaggttctgttatgagaaggacggttgaaaggtgtaaaaactgaaccagacgcggcactgcttgcttttaaatcaatttgggaatttgtttctgaattagcgctatatcctgacgcagaggcaatagcatctgccatctttggtggaatccttgatattgaggaatttttggacgacgaagcggtcacttcattagatgtgacagctttgttctttgtcgcattaccaaattcatccgtaataaaagtcgaaaatggatttgtccaagaaccaccgctaaatgaacctttaaaaaatcttgggagcaactgtggtaaagtattatcatctgagaagactgagctctgtaacacaaaataaagtaactgaacatgccttaaaaatttcgagaattccacatcaaccatttcgtaaatcgatttagctgacttaaaatttttgttggacggtgaaaaatcttccaaagtagaattttgtattgaagtccttggtgttacgacagaattaacactatttcttggacctaagactgagaaattttccatatcgttctcattgactgtactgaatgatgatctcattggagtcaatgtatccgttgtactggtacttacattacgtttaccggacaatggaactgaaactagatcatgtacactatctacttcaattttaccatcatccccttccgtcctagaacaattattttcctgattatcgttatccttgtcattcatagtatccattttttttctgtgaaaagctgaatcgaaatataaatgagaattgatacttatccttgacaatgaagagattagacctttgaaaatcttcttaatctccttgctgcaacttttggctttaatttcatgttgcattagcctgcagcctaactgtgtgaagactattgaatctgatatcaaatcaaagtatttcgtgaaattgagacgattctctttaaggaacatcttgtgagccgttttagtataataaactgttaggtcttgtaattctgtccacaattttatatctcttgaatagtgataaaagatgtcactcttggccagtatagaagagcgacttggggcaactacccttgattgaatattctgcgttaaatctggagcagataaagaatttaatgatgaaggaccagcctcattgaattcgtttttgttattttcgttattattatcatcatcattaatactgttattatttccatcagtttcttttgaatcctgtttttccattagaaggcttgatctattttgttcactttccgattgcttcgatctcgtagaactgtcctcaatattcgcatttttcctcagatctctagtatataggttaacaagatgatcattgggcgggaattttggttcgctgtcacaaatgtcatcggattccataattgagttagaaatcaagggtaattctgaacagtatatatcaaggtctttgttatagtataccaacttgtaatcggatgttttcgttatcagtggtatgggggaccaagtcgaagcaatgttcgaacgtataccattaataatcatttctatctcttccaacggtaatatcttaattgtttcttctgctactagtgggggacctgctttctcaccagaagtttgtaaatttgtttcattgttattcataattgcgtttgtattcatctcagatgagccatctgcactctttgtcatatcctgggatagactagcattggaattaaagttcgaagattgaggggttatgtgggaagcatcgtttggcgctgaaaagggagaattattcatcgatacggtgttattgtggccggaacttgtttctgcattgtgggcatttgataaagacgctgataaagtagaactccccctcctgctcttgctcggatttctaggcacatgtaaatatgcactattgcccaagctatttaagctgctgcgccttgagctcttactggaactatattttttcatcggatgactgtgctttctgagatgactgtctcttaaaggtctaccgaagttttgaggaaaccagcctctgttaactttcccattactgtcgtcaataactaatccatcccaccacccagatgagtttttgttaagtatataaatggtttccccttgttgtacagacaaaagttgcgaagaactgtcttttttaatgggataattaaagtcataagcagcgactactattccaattggacgaatgctggtcaactcacttgtcgagggggaagaagaaagagaagctgaggatgattctgtgttagtggtagtggaagtgttagatgaagagctgatcgatggagtttgtgaagcattgcctgcctcccttgcagaacttgtattgggaatagacgtgttagtatcggacatgatacaactatccaatatccaccttgctttttcgttttattttttagtatttattcgaagaaaaatgtggctctttttattcaatttctttccgaaaaagaaacagtctatctaactaaaggaattgcttcacggtgatcaagtcactataactgtctccgccgtgttggtgatgcagttttctctgtaacttttgagcttatttttctattttattttttcctccaggtctctgtcaaagatccgtctcccgcgatgtttaaaagtcgttttagcgaattacataataacctggaggtgactgacgtcgactattttctgccccataaagcaacaaaatatttaactcataaaagcttcgaagaatatgtaaatatagtagtatgaatctaactgagtaaaaaaagggaataacaaaacaaaaaaaaaggaaaagagatggatagcatacgttatgaaagtaataaaaccttagagatagagatagagagagagagagagagagatgcaccttttctattctcaataaaaaaaggaaagtaagtgtaaaaaaatttaaaggagggatatatgacactcctactaagcagtcgttttttttttcttttgttaatttcattcttcatgctgggttttggatgatctagtgtttgcacttaaaataattttttttcctgcattctgacatcgctttatacatcctcgaatgctgtaatttcaatccgaaccgtttcagctgctttacaaaccagttggtatctttgcgaaccttaaactgaaaaactcggaatggtttcattgacttgaaacgaagcttgcgcaactgcaatctggatcccgaccaacattgttttgctttttggcaagaatgatcgaaataccttttaatatgtggagaaaattgcctgtatttattatgaagtagcacaaagagccttttccagcggcgtttctgttctttatgcaatacccttaaactttcttgagcggatttaaaagaattcttgagaaataggtgtaactttattcttcctccgtttattttgttaattctcttgtgccaaccgtctttcattcgagcttttgttgtataccataaaataactaagtctgttttgtatcgtctccagcccattaggtcatcatcctttaatgggtatgcaatatgattgtcgaagtcgacgtagtattttcctgaaggagcccactgacttaaagagtcacttgatgaatcgtaagattttttatcaacaaaatcgatattgccgtacaacagcttcctttcattattacgtaatgactgttgtgatttaaaacctgccaacacatcaccagtcagggaatattcgagggcgaggtatgaaaaggtcatggaaagcaatgaagatagcatgataacatgccacatcttcaatttagcagatttaccctcacttttatctatgatatgatccgatagtgtgctagaattccttatcgtactatccttcagtttcgacccctccatacttggcaataccgttccgccaacatttgagccggacaaagtatcaaatgactctgaaatagtgggaactccagtttgatcaatattaactccagcattactaaattcattagatgttctaaaatcgtaaatacgattcatctgtgcagactcttcactgctagtgttcgataggacatctgcatcgaagtcctcgtcgtcctctcctgcaaaggagctttcatgcaaactatccaaagatatttctgacttcgatgactgttcttccccttctctccctttacgtaatctacgtaatctaactaaattccaatgatcgtcttcttctgacattttaggtccgacaactcgactgttttactagtctctattatcgtcactgcgtattactctgctactgtgcttgttactttataccggaacagtagctcctaaacgattattccaaatgaagaaaaacgtttggccagtaacctgcataaaactgaataactataatgatactccgactaataatatatcccaatgccccatctcatctgtgtagatcaatttttatggctcgatccaggtaccttgataagcagctgtcgcgcaaaggggttaccgcaaaatggatagatggaccgggggcacaccggggtagggggtccggagggttaactgtcaactccacccatacaagaccgcgcagaaatcgtcgcaggaccccgccgaacggcgaaagcaaatatgcagccgtaaagacctaacaataaacctaatgtagtcatagggctaattgattttaaatatatgacctagctgactattcaagtttgccctaattgatgagtttttgaaaaaaaaaacaacttaggtttcgctatccaagcttatgctatgggaagcgttggaaaacttgcatatagtatgaacaagagcgagatataaaactataacggtagatggaaagtaaagagtagacaagctcggaaacatggaaaatagcatgatgtttatatcgcgttccttgcggagacccgttactgctttgaactgcaatttacaaagcgttagaacagtcatataccttcataagggtccgagaattaatggtttgagacgagatccagagtcgtacttgagaaatcctagcggggtactctttactgaagttaacgcaaaagagtgtcaagacaaagttagatccatactacaattgcccaagtacggaataaatttatcaaacgaactgattttgcagtgtttaacacataagtcgttcgcacacgggtcaaagccatacaacgaaaaactgaatctgctaggagcacagtttttgaaactacagacgtgcattcattcgttaaagaatggttcgccggccgagagttgcgagaacgggcaactttctttgcagttcagcaatctgggaacaaaattcgctaaggaattaacgtccaaaaacacagcatgcacattcgttaaattacataatctagaccctttcatattttggaagatgagagacccaataaaagatggccacataaatggtgaaaccacgatttttgctagtgtcttgaacgcatttattggtgcaattctgtcaacgaatggatctgaaaaagcagctaaatttatccaaggaagtttgctggataaagaagatcttcattccttggttaacattgctaatgaaaatgtagcatctgcaaaggcaaaaatatccgacaaggaaaataaagcatttctgtgaagatacaaaaaatatagttgatggttcactggccaaaaatgtataaaagaaaaatttatctgtaaatagtgatcgaaataaaataagataataactaaagaatatatatgactttactgtacagatctataattgaaaaatgacgagaggtcctgtgaaagagtctgcctgttcgccatcttcacacattcaaccaattccctggtgcgcttggttacttccatcaggatatctgctaatttttgatagaatcgtttcttcccaagctttgtggaatcgcatccataagtacacaattccgataacttttgcgagcaatctgtgagcctttcaataatttctttacagtgctcgcctaaatccagtttaaaacttttttggaccattgctttggtagtcatatcaatcaccgattccaaaataggaataatctcgatggaattttgacataatctcgaaactgatcttgcggacttgaacaattttgatttagaggcttgaacatcattcaaaatgccctgtgccataggaagaacaaccattgatttactctcaacaaattcgacgaggttatttatgttagcgttgtgcgtggttgagttgacatcagaattattcaagttttcttctgaagtagatattcttaatccaagaccagagttgggagcaaatttctgcactttctctctgaatttcctcattttggtcacggttggcgagtaaagtacgtctgcagctggcggaatatttgcatacggcttcgccgtttctgccactggtttagtgataactttcttcggaggtgatgcctgataatcctgccgaaatttaccaattagcggcaatgtgttaccttgaggacttggacttctcgagttcgagacaactttcagaggcaaaccttctcgcggagatggctcactcgtaattcttgaagaattcttagtgttttttaacggcgacacagacgctaagtttgtttctccagatgtattatttcgtaccttcccactctctcgaatagaagattcagatttttctatgatggaaattgatggcgatgctacaaccactggcatgtccgatttttttgtaatgggcttaccagaggatggaaaactaacagcagtactaccgctatcacccagagatgatatatccttaccgtttttctcatttttcactttttcaataatcttcaacggtttcatacctgcctcgatatcactgagttctccttcattgcgtgatatatcatcacgtgaggtggatttgatcttcacaatctgagcaatattgcagaacgcaaaaatcacttccgaaatagatgattgagctacaattcgtggtattaggtccccatatgtgagaaaatatcttgttgaagtgatagcatgagataaagcactctttaagtatactatttcgttttctaaagaactttgcagtgaaactgatgataggacaggtaagagatcgcctatcaactttgctatcttaattatagtctcaagcagaatcggcaggcgtgtggtggtggtatccacaggatcaattcgatggagcgtgttttgaaaataaagtgtaaattgagtttttaattctcggaagacttcaatggatataataccattcacgctcataaaatcatcgtttattttgaaggattcaaataatgtgtcatttaaatagaaatttagatcaccctcgtctaacccattgttatgcgtccccatatccaaatgatgtaagtttctcctttcaatttccgtgaaaatatcaagaatcaatttatggaacttcgcgtccttcaatcgagacagtttagattgtgctttacctcttttcagatcaagatcatttagtgatgcatccgcacccgaatctgtcaatcttttcatcaattcatcgttgacatcagtcgtcagttgccaaaattgtacattcgacaattttgtcaggtctttatttctattttggcggttttggttccttcttctatcatcttctggtacagaggcctctataattcttttgaaattcttataatccgatataaggtctatgatttgatcattcgttaattctgagctaatcattctttttatttcgttatggccacattatgatattcttttactttactgttttaattttatattctgcgattcaaatcataacagatatttagttgaataactctgtttttcttcatttccatttttttctatttacccttcttctttttattttacgcgtctcgcgttttatatattaatagtaataatatttaatagtgtatgtttgaaatttttatatgtctttatttcgctaacgtaaaaatcccttcttctttgtagggacgggggagtggttaacattgggagaagcactatttattgaaagttctagctgttttttcttgtcctccaaagcttttaattgtttagttaatttttccttcatttctttatgtctagcaaacaattcagtttctgatttttgtagttttttctccttttcggaaactttttgttggaaaactgttttcatttcaatttctagtttggctagttttgcctcatgtaaagttttttcttctagttgtttagatattggatcgaactctttgaaaactgaattatcttgcttaataccaagttttgccaatttagaagacctgtagttttcgtatagtatcttgcttgtcctttcctttaattcctccatgaattgcttgatcaataaatttttcaaaaggttgaaatcagagtggttgtcattgtccacttcgatcaccccccatggataggaacggcctctcacttgattaccactgtagttctctacaatatcgttggaaccaataacagcataaggtaaactactaaatagtctttcggataaatggctattttctgcatcatcgttggaataaattggaggcttgaacagctcgatattagattggattaactggttcataatggtcttcttgaaacttaagatctcttcatcagttaagatgtcagatttagcaatgacaggaatcaagttacatttttcatatacagattgcataaacttcaggtccaggggctttaagtaatgtcctgtaggttcaatgaaataaagacatgcatggattcttttatcgtttattgaatgtctgttgattttgttctccgcatccaagtattgatcaaaacgagagtcaatctccttaatgatcgggtcccatgatttttgatcattatttaaaaaatcaccaaatccttcagtatcgatcacgttcaaattcagtttaacaccattttcttcaataaccgactcatatgacttaattttgaccttgtgcctttgttcttgtgattggttctcgtgaccctcgccctgaccctcctcttcttcctgatcatttgcaagttcctcctcgtaatctttcactaaattggcctcaatatcatcattattaaataaagttttcattaaagttgtcttaccaataccatcagggccgacacataggagattgaaactgaatccgttctttatggaccttctgtgccattgcttgggcaaattagcaaaccctacataaccattgatttgacgacgaatgaacttaatctccggttggtcaggcagaacttgacccttttcgctctgagaggaggtgatgcccataccgaggccgggttccacctttacatcggattcagctgcctcaaatctctcgctgtcgtcattttgcgtaccgttcgtgtactgcgagtccactccatcatgatcctgcgactcttgtttgatctgaacatcattgaattgatcatgctgacgctcttcttgttccgggtcctgcttaatggacacttgttcctcctttaaactcatggcaacgtattataggccgatgtaatcgttcagttgtcgtgtgatcctggatttgatattttcttgatctgctttcctcgagagattttaacttaatacacaaaacaacacaaaacgcaattcctaaaaccgagacaaaaaatggcaaaaaatgggaagcgaaaacacgcccccaccatatcattacacacgtagatcataaaagacgaaaatactaaattagccgcccaggtggttcctttttacgaaaggaaggaaggagaaatctagaggtgctgctatatatgtttgcaaggtgcgagaatattctgtcacaattatcaagcagcaagttatataaagttgtttctcacagcttcttgcactcccttgcggtgcctttcctgcaccactagtgtaactgctgatgtcttccatttgatgtcagaatcgatttcttgttacgccacgaacagttaatatatagaattaaaggaatgatcttgtacaactacaagataacaatagattaacagccaatattaccgtcgccgctgcccgcttcgcggagaaacagcgaaaaacaacgaagatcgttctcgaaaaagcccaaaagctgggtataacgcaacaaaataatcatagatttgacaattgtgctcccaatcttgctttgaaattaccattataaatgaactctgaacagctgctgcataactatgtttcggattcgctactcactactctgataagttttcaagagttcaagcagcaactacagtcgtacacgagcgacgagcaacaactgcaacattggtacgaattgcttcaggccagggatgcgcgagtgacctctgagttagaagcacgaatcaagcagtttttcataacgttgcgctctagattactgcgatttctggaaagcgagcaactatcacactcccttagcctcgagacactgatcgacgcgctgtacaagattaatgacctgttgcaacagcgtttgcagattctggatgatgctattcaggaaaagacctcggaactagcagaatttgaaaatatggttcgctcaccgagtgcaggagacaatgccattcctggcctattacaaattatacaatcttatattaatctattagaggaaaactagcagcagacatcccggtcaacctgccccacaggatattcctcgccgatccattgaaaggcttcgtatgttgagtttagctgtttgttatcgttcatgcagtacccgtcaccactcgttaattttaagctcccggtgcgctgcatctctgtaaggaagaccactcgtctcacacgagaatggatcagggccatggagcacattgagcacggctcatgggtcaaatagacgtcgtaatcaagacacagataagagtttgcgtcttcgtctacaccctccctgagtctttcgcctaccgcacggatgcccaccattacactgtggtcgatgggtagcgagttttcgcagtttctgccatcttctgccaccactttgtccttctttcttgatgggtcaacaaagacgctcaccattggaaactgttttcctgccgttgccatcttcacagacaacgtcgacgcacgcgatagctcatttcgtacttcctgcatgtctattttatagtcgttcaatatttgatcattggggttgccgttccaaatcaacggccagtacttcacagaccaggcattgttcagttcctttgtgctgggcgcaaactcaggcacttcgatatcatcactcagttcatactttttcgttccaacccaaatactcttcaatttattgtttatttcaccttcgtcgcaaatatactctttcgaacacaacaccacttccaaggtggaggtctcgatgtccttgcggatccttttcaaatgtctcaatgaaacagggtcatttttctgaaaatcgtttcgaattagcctactttactagttagtttacttccatgaatacaaaagcaaaaatcatatacatactctattactttcttcgagtctcttggatctattcttatactccatacattgactgcacttatatatgtttgaaagttagttaattgatcctgatttctgttagatctcatagatacatacttagtttgggcgtatttacatctttgaaatttctaatttgcagaagccgattttctattatcccgttctgataatcgatttttagcggattattaactttcttaaccataactaacacgccctcatgaatattatccttctgaggtttgaataatatatacctttagatgagctattggtgattcgcatttaggaatgaaaaaaagtaaagcatggcaatgaatgacacaagtgaaatagaaaagtgaaaaattaaaaaaaaaaaaaaaaaaaaaaaaactgatttatactcatgaaaatcttattcgagttcattcaagacaagcttgacattgatctacagaccaacagtacttacaaagaaaatttaaaatgtggtcacttcaatggcctcgatgaaattctaactacgtgtttcgcactaccaaattcaagaaaaatagcattaccatgccttcctggtgacttaagccacaaagcagtcattgatcactgcatcatttacctgttgacgggcgaattatacaacaacgtactaacatttggctataaaatagctagaaatgaagatgtcaacaatagtcttttttgccattctgcaaatgttaacgttacgttactgaaaggcgctgcttggaaaatgttccacagtttggtcggtacatacgcattcgttgatttattgatcaattatacagtaattcaatttaatgggcagtttttcactcaaatcgtgggtaacagatgtaacgaacctcatctgccgcccaaatgggtccaacgatcatcctcatcatccgcaactgctgcgcaaatcaaacaacttacagaaccagtgacaaataaacaattcttacacaagctcaatataaattcctcttctttttttccttatagcaagatccttccttcatcatcatctatcaaaaagctaactgacttgagagaagctatttttcccacaaatttggttaaaattcctcagagactaaaggtacgaattaatttgacgctgcaaaagctattaaagagacataagcgtttgaattacgtttctattttgaatagtatttgcccaccattggaagggaccgtattggacttgtcgcatttgagtaggcaatcaccaaaggaacgagtcttgaaatttatcattgttattttacagaagttattaccccaagaaatgtttggctcaaagaaaaataaaggaaaaattatcaagaatctaaatcttttattaagtttacccttaaatggctatttaccatttgatagtttgttgaaaaagttaagattaaaggattttcggtggttgttcatttctgatatttggttcaccaagcacaattttgaaaacttgaatcaattggcgatttgtttcatttcctggctatttagacaactaattcccaaaattatacagacttttttttactgcaccgaaatatcttctacagtgacaattgtttactttagacatgatacttggaataaacttatcaccccttttatcgtagaatattttaagacgtacttagtcgaaaacaacgtatgtagaaaccataatagttacacgttgtccaatttcaatcatagcaaaatgaggattataccaaaaaaaagtaataatgagttcaggattattgccatcccatgcagaggggcagacgaagaagaattcacaatttataaggagaatcacaaaaatgctatccagcccactcaaaaaattttagaatacctaagaaacaaaaggccgactagttttactaaaatatattctccaacgcaaatagctgaccgtatcaaagaatttaagcagagacttttaaagaaatttaataatgtcttaccagagctttatttcatgaaatttgatgtcaaatcttgctatgattccataccaaggatggaatgtatgaggatactcaaggatgcgctaaaaaatgaaaatgggtttttcgttagatctcaatatttcttcaataccaatacaggtgtattgaagttatttaatgttgttaacgctagcagagtaccaaaaccttatgagctatacatagataatgtgaggacggttcatttatcaaatcaggatgttataaacgttgtagagatggaaatatttaaaacagctttgtgggttgaagataagtgctacattagagaagatggtctttttcagggctctagtttatctgctccgatcgttgatttggtgtatgacgatcttctggagttttatagcgagtttaaagccagtcctagccaggacacattaattttaaaactggctgacgatttccttataatatcaacagaccaacagcaagtgatcaatatcaaaaagcttgccatgggcggatttcaaaaatataatgcgaaagccaatagagacaaaattttagccgtaagctcccaatcagatgatgatacggttattcaattttgtgcaatgcacatatttgttaaagaattggaagtttggaaacattcaagcacaatgaataatttccatatccgttcgaaatctagtaaagggatatttcgaagtttaatagcgctgtttaacactagaatctcttataaaacaattgacacaaatttaaattcaacaaacaccgttctcatgcaaattgatcatgttgtaaagaacatttcggaatgttataaatctgcttttaaggatctatcaattaatgttacgcaaaatatgcaatttcattcgttcttacaacgcatcattgaaatgacagtcagcggttgtccaattacgaaatgtgatcctttaatcgagtatgaggtacgattcaccatattgaatggatttttggaaagcctatcttcaaacacatcaaaatttaaagataatatcattcttttgagaaaggaaattcaacacttgcaagcatatatatatatatatatacatatagttaattagtactaataatacatgaaatactgacagcttatgatgctgataaggaaaatattgccgcaaactttgtaataagccaaaagcactaatctcttttccgttagctttcataaaattagtgtatttaagtaaaccccggcccaaaatatgctctcaaatttgcttcatccttctgctttcttatcctttctacttcttcaaagcctcccgattttttcaggtttgaattacccacaaaattttccagttcatcatcaaattcattactagctttaagttttctttccatctcccacatcttctcagccttgtcaatagcttcgaccctactatcgtggtcagggtttaaagattggacggccaccataacttgctcccttacctgattaaatgtgcccggtctcataataggcaaaataggattactttttgatctcgaagggtttttttcttgttcttcacaacataacttaataagatcgaaagtttctaatgccttacccaagtcttccttcaaatctaaaatcaactcttcctgcaacgtgagaaactgttgttcttcacagaccttatcgagctcagcttcccaagtttttttccaatgtggtttttcagtatcaataaactcctgtagtttaagtacatctgcttgggcattttctaaatccttggatacggtttctagcttctttttagcgggctgagacctacgctcagcaacgtctttcctcataatttcgattacatcttgcaaatcatctactttacttagcagagtatcggataaatcaccgagttcggtctgtgatttttccatgtacattctgttggaagagtttttggcagaaaatgataaagacttaaagttatcgacctttcgtaaaatgttgaaaatagtctcattaatatttgacctattaatattatgcacttgttttattttccccaattcgtactgaatatctttgatcgttttatcatcatcttttttgttttgccccacaagatcgtgtttgttagcttcaaggccaggttgtggtaaaacttccgtttgcttgccgctaattgcagaaccaaaactcatttcttttaaatgtcttattatatcattctgactattcgatatctccatcttaactgtgtcaatgaattccttgatcgtattatttggattctcttcgagctttagctcgataacaaacccttctttaatatcgagaagatttagttcctctaattcatagaatactccatattgaggatccataatatatatgtctgggaaggaatttgctccaggagaatacgcaaagcgctcaataaataggagccttaatgcgttttttgtagtaggcagttgcacatgacacttctttgttttgtctcctatccttaaaaatactggacaagttccattcatggctttatctggcgaagttgtaacaacgcttgataatcttcgtggagatgcacgaacattctcaataggcaatggcgttttcgccaatggactcgcctttgatacatcgtcaatgcttttacccttattttcagctgaattaatgtttctatcatcatcattgttgttatttccgtataactttgactttcttacggtttcctctagatgcaacatcgagggtgaaggagttgtcatgaggccggcagccgcagcagcttctgttgtagactgatttgtcaatttagccatatggtaggcagagtatctctttgaggctctcctttgtaaattagttcccttcttcaattgtgaaagtgcatcatcatcatcagatgcgtttggagcattgttagatttaaggttttgtttaatattagttcttggttttgtcaatgttgcctctgctgactgagcagagggtgttcccgtagaagtagaattcactttttccccatagctgttttcgactgaatcgctttgcctctgatcacgtacaatactgctttttctgctacttaatggagtcccctcacgggtcccttcactacccaatgaaaggttactagtaaaggaagggttttgttgatgatgtgattttacacttatccgatgctcttgctgcatattcttcaaaattgcttgtttaacctttagtttgtctaaaagtgtcactataatctctctgatttttggcagatgtttatttaaagtttcatcagatggtggttccctcaatgtcacttccaatacacgtcttaaagccattggcacatcaccaacatctgacatgtcaactttcgcatgcatgaagaatttcgatacgactttgaagtcattgcccaactgaacgtatgcatcagatactaatcttccagaggttgtccccttagaccattgtgttaagacctggaggaggtgcttggtggacatcagcaactttgttactgtcgtttcaatactactactgctagaagcagttcttttaatctttggggtgccatacgtagggtcatccacggccatcttcatctaattttaaaataatacgaggattactacaccaatttggcagccagcttctactctttttcccttttcttgggtttgttttgatgccattatctcaagaatgcataatagtaggataaaattcgttcagctcggctagcgagatatcttcaaagagtaaagcgcatctgcgtgtaaaattaaattcaagaagtgaaagaataaaagataggattgtagatttgaagtttagtggtagcgtcagcagataagcttatggatgttgatgaaccgaatcctattgtgatatcagattctgaggccactgatgaggaaattagtatcatatacgaacccgaattcaatgaaaattatttatgggcagaggaaaacgtccaagaagcaagcagatcacagaaaattgtcactgagaggttgagcctggattccactgctggagaatcttgtactccttccgtagtaactgatacacaagttactacggggcttcggtggtctttgaggaagaggaaggctattcaaaagatgccatacagtttagaacgcataaagcataggcagttgctagagggctatgatatctctagttttgacagcatttcgaatcagttgaccttaccgaagaacgcttctacagtgattcactcaaatgatattttacttacaaagagaactggtaaacccttagatgagcagaaagatgttacaatcgactccattaaacccgaaaacagctcggttcaatctcaaagatatgatagtgatgaagaaataccaaagaaaaggcatcgtacttttaaagacctcgaccaggatatagtatttcaatcaggtgattctacggaagatgaacaagacttggctagtacaaatttacagaatactcaaaatgacgaagtaatatttagaggaagagtattgaatgtaagaactggttaccgtggggtcctgccaagagttgcttgggaaaagtcgttgcaaaagcagcagtcttcaaaagtcacgaaaagaaaaactcaattattgaaccataagggtgtggctaagaggaaaatgaacagaagcgcccatattgaagatgaagaacagaacttattgaacgatcttattgcacctgatgacgaactggatatcgaggaaaacgcccctccagatatatacttaggaaatcttccagaggatcgtgaggctaacgaaaaggaattaaaggaattgcaagaatattatgagagcaagtatagtgaagacgcacaatcggctggaacttctggttttaatttaaatgaggaataccgcaatgaaccagtgtatgagctggaatatgacggaccggggagctgcatatcacatgtgtcttataaagaccagcctattatttatttgaattcacggcattcagatagcggatttagtgagcaatacaatatatctgccgaagataatcaaagtgtaatttccctagatgctgctgaagagcataacgatggtataattgacaagatgttggttaaacctaaaagaattaaagcaaccaatgatgccaactttttgaatacaaaaagtaagagagtgagaagatataagtacaaatatcgaaattcttgtctggccccaagtacaaaagctatcaaagtcggaaaacggtcagcgcataaatctcatttggcagctaataatccagtttcatttgtttctaagaagaatcatgtaattgatgattatttttttgaagaattagaatctcaatccctagaacaggatgacagctcttctctcaagccacagaaaaaaagaaggaagaagaaagcacctatatactcaagtttctccgctgatcttgaatcgagacgaaaaccagttttcaatactgttgtagaggttcccacgaaccgatacgctttcacaaagccaaatgtacgtaatagggacagcattaatcatgacatggaatttgaggaagaagactccaatcaagagcttggaccaataatggtcgtacttgactcaattttactaaaaaaaccttttgagccacctaatttcttcaagatccagttgtcagacaagagtttcttgctatcaaaattgaatcctgcagatatagctacatcattacagaaaatattcagagtaatcattgataaaggtatcactgatactgaactagttcactttaacgaaagccttattgcttttttggtgcaccttgacatgcctgaactattcgacttaataggtgaatttcatcgtgaatttagatcgaaggtcaatagcttgaggaaaaaagctaaaccaatccatttttttcaaattgcggcatgccaattaatgtttctagaaatatcaagatataacaaaatttcagccgctgcaaaattcgacatggatgtcaaactcttagatcatattgtgtctttcttcaaattactttctgtctgttatgattctgttatgaaaaatccaatgcaatatctgtacacaagttattatattctctctgctgtcgttgatgtcatacataaaaaggaagctttgtgggatttatttcaaaagcaccccttttcgcctcatatttcactgttgctggtcaacatatttcctacgaaagtctgccgctggcaggttttgagattagattctgaattccaacccttgagttcggcatttcggttcatcaattattgcattgagacttgtaattggaatgttacaaattctttgattctttctctcgatcgcatattcaaacggagaagattttcggactttgaagaagagtctgatttgtcacaaaacaataagataatttatcctccaacgaatcagcttacgagtcgattaatgtttaacagatatttgcatctactgacgttgtgtgaattgtctagttctgatacacaacgtgtgataccgatgggtgatatttctatgaatgattctctatctgttttgaagaaccgcctcaacctactaattgttctagctacacgttttgatttaaacttagagaagcgcttccaagagctaacacgaccgttatatagtaaggaatatttaaacttgcatacacagaacacagtcaggacgataacaacattgatcatgcaggccagcctttcattcctggaaatcagtcgaatcaaaaatcatccattcagtggaaaatttattgcgtcattatttgataaactagtacttcaacaaccttccatatcgggagtaacagaaaattttttgaaagaattcacaaatttagtctccaaaatgaaaagaaaaagcgtgagtatgctcaaatttctgtatccttcactggtggccatgtctcaagaaaatatattcgagtcgtctttttttttattattacaggtatatttgaagagcttagatgtgctgggtccaacttgggtgcaaaattatctttttcagtttataaagagcaaggctcaagaaaatgaaagatggatagaatgctattgtcagatcggaaaattcctcgtagattctggtatatttacctggtggactttctttacctataacggcttagatgctgcattacactttcagcttgcatttcactcccttattatcgatttctgtgatacagactcttttgaattactgaaaaaaccgctttattccattgcttctgatttgctgctcatttccaaagatgacgctttctatcactttctttccaatctgttgaagagggcacatatcatagtagcagatttgaaacctgtttccgatgagaatgaactcctgcgattggcttatattttttctaaagcattgaaaaaaaatgcatatcaagatctattagctgttttcttatccctggcgaaaaaacattacgatgaaggggacatcagtagaaatttcttggcaaaatatctcgaatttcttaacaaaaattgcttgactgagctaagaaataatcaactcttcatcagtctaagaagggaacttggtatttcaagtgatgaagacgaaaaatgtgcgttctgggactcattcaatgaagcaggtgatatactttccaaagctgcatttgttgaaaccggtattgttcaagcctgttgcactgggaatgaaattgatggatatcttgacaatttaagcactttattcacctccaccatgttagagagcccttttgcatttttttctgacctggtgatagcacacatatttgagaacagaccttttttcgacgtgaatatcaagaattttcttctatctcacttcatagaccttttcaacaaggttttaaaaatgaaattcgagcaggtatctcctgatgaatttgctgaactttgcaaagtatacagggcgttatgtattgagtgcgcaacagacgacacctttaatagtaatagtgatttgatcgccgcaaaagatgcgtttttggtatctgtgttgagaatcgcagatgggttttgggagcatgacaaacttttgcagctaaggatgcttgatagtaatatgaacatacctaatcagattcctcatactactttgcaaagttcgctatctgcgattgtaataaagataatagaaagtaatataggaaaaattgaggcgtctgaacctttcaaaaccttcaagaatacgtaaattatacacatgtaatataagcatatttaaaaattctccgtaatatatgtcatatatgtcaaattgcgaattagtccaaatagaaacaagatctatcagtgttggtgataaacattttgtattcttttggtaacgtgtatctcaaagaagtgcatgactttttttacgttctctttagtcttgatttagttgcttctgcgtttgttaaattttttgtccttcccgtttgattaataatacttataataatacaattctgtaacaagaaaagcaaagttactacattctcattgtggtttctaagtcatctaatcttctcctgccccttctagataatctatcagtttctcttttcaatcttcttaagtttctttctttttcaatttctctcttttgtatttcttcttttgttaatatttccacccttgggcaccaattggagcccagttcatcaatatccagccttataccagataagtacccaaatgcggcatcgtttgggacatggtcctgaatcaagtggccatctacccagtccttctttatcttcaagatagtttcatgaagcgattgagatattaaggggatgaactctcttgttaagccaaggtcctgtacaatggatgtagcaaatctttctggagtaagtgatttgtcgttcaagttccactggaagttatcttcaaaaaatctgtcttgtaagttgcaggttaggttgattatcacgtggaggtcagacattatctcagtggctgcaatattttcgaggtctttcaactgctcttttattatattcgcaatttgagtttgtaaggtagcggaagtcatatcaagatctttacagtatatagaggcaaattcctccggagatatggagtcgtcattgtagttccagagaaactggtcttttatggtatgacccatatgttctatatccaaagtaattggtatcatgattgcctctccagaattggcgtttgccttcgtttcttgatcagtgttgagtctatatggagacaccacttttccgttaatgaaagtatctcttattttagggtatctcaatatgttgaaggggttgtggtgttggtcttgcagatccggtagaacggcgtttccaatatcctgtgcctgcgctttgttgctcggaccattgctggcgttgttattgctattcaaaccggataaagattccacaaccatgtttgaacccgcatcgtatttgttgttagagataatactatcagctccattcatgttctctaggacattgtattcggaaccgtccatggtaacaccatttgtaagtgccggagtattttcatgagacactgcattatctttatagtgtgtatcagcattgttgaaattagaaccgttcatattgaattcatcaaagagatcgttgtcatattccgcatagttgaccactttagcccttttatgctgccttgtttgttgagccattgtaaagatggggataccatcatcttcgtttgtcaatctgttatgaaagttagaaatataagcttgtggaataagctggttttggtgcgacattgtgtgctgctatgtgcctttcttctttcttttttcaatgtacttcattcaataatctctatttgtcgtattttctaagttttttttttttgtcaaagtagtcgcggcgactttaaatgagcagatcatcatttagtagacaaaaagacacgggacatcttctatctatatagtttacatactttattatgtgaaagagtctttcgaaattgcaacaatgctcgataaatctatgggtcatgtgctctataattcctgtacattagcatcgggtgcgtgtaatttttggggtgatatggcattctccatcaacttttccttttatttagcatcttctgtaagtcagatgctacttttgcactgccgtgggtctccttgtggcatataaagcatttggtgccctttttcatatctttggcaaaacacgatccacaaaaataatggccacagtttgtgaccactggagacttgtaatcttccttacaaagagtgcacttgaacggtatcttttccaagtctagagtaaccgctttggagtcctctttatccgcattccattcttggttcagcttccagccagtcttgaaatcatccctcgagtgtaagaacttgcagctatctccgtaaccacagtatcccgtctgtttgtaatctttgcaaacgtcgggctgaaaatccatcagcaccgtggtccggatattcgttggttggttaatctgtttagtgaggcgtttatttttaccgctcatgttcagtaccagctcattgtcatcactaggtcgcctcttctttgccttctcagccagctcttttctctcaaagtttagaagatcttctttagtgctgtcgtcgttgaccgttaaagtgtatttatctaaatcctcaccctttttctgtagtttaccttcattctcatgtgaaagttgaagtgtcctgctatttccactcttggctaagctcatgaggtcactggaacccttttcttcatcgctggccactagtttctcttcgctaaaattaattttctgcctctttttctggttcttttcatcagaagagcttttgttcactaatctctttctgaacatgaatacctggagctttgattaagtgatggagctttcgatggctttagcttgagtccacttcagatagagatgcgcatggctttttcttattattctccggttgcacggaaagaagcgggaagaggactaaagggtttttggatcagcttcacaaaatatatacttggatacgttcgctactgaggtaaagtgggcatgcaaggttgcaatttaggattcgagctgtctagttgatcctccggagtgtaaaaactgattttcaatgagtggtaacacaactaacgtgcatgagactagagccaagtttgcagagacgctgcaaccgaggattggtggcaatactacaaaagtgatacgagctgctttggaaaagaacgaagctgaaagcggggtgtctgaggataatgataacgggtcattggagaaagttaacgtagctacttcgccgcttttgacatcaacaccgcccacaatctcaaaggcgttggtgaaattgtacccttatttaattctcattgacgaattcctaaacgttgttacatggacaggaaagaatatttggagcagtgttttgatgctgtgtctctttattactaccgttgagtattttgaaacgctggtgaagtactttggacatcttgccatcattgctattttgtggggttattccctattggacaattatattgagggtacgttgagctcctcaccaacattagaagatattgctctcttaatgaacagagtatccttgaagtcagatattttgctctcccccatggttaaccttggaacgcaagatattcaacggcttctatatactacggtcatattatctccaatatacgtgatgataacctggctacttttaccaccgagaagcttgatgctgatggtgggcatgttccttttaacgtatcactcaccatggtctaaagtagcaagaaggcttttatggaagtttaagattgtcaggctgcttgttttctacgtcacgggtttagaccttggtggaataaataaggaccagggtatttttgctacagtgcagaagcaagtgaaaaagttggcatcaacagaaaacagtaatggcgtattatccgattccaagcctatccgttttacttatgttttgtacgagaaccagcgtcgttggttaggtattggatggaagcctagtatgttgagttatgagaggactccatggaccgatgaatttttgaatgaggctccctctcctgaaaacttccatctacctgaagagactaacactatggtttggagatgggtcgacaagacatggaggctagacatgactaatgacggtgccattcaagtgcccaattcaaaggcaagaacttccgcagatccctcccctgacgagggatttatatattacgacaatacctggaaaaaaccaagtaaagaagattccttttctaaatatacaagaagaagaagatgggtaagaaccgcagaattggtcaaaacttctgactttgatgaaagcgtgataaattcgaatagaaattctgccattgaacaaaaggttgaagaaaacagcacgaatggtttaaccgctgagcaagagcttgggagcaacaagcaagagaaagataatgcgaaaaaagtaggagagcctacaacagaagagacaaaagaatttgccgaagcatcaaacatcaacgaaggcgagtttgaaagaatttcctcgaccgatgaagaagttttaaaatctagggcaagagatcgactggcaaaagtattagatgatactgaagagaaagagcaatcaaatccaaccattggtcgcgatagcaagaaggccgtatgatgctcgctcccgtttttacctttacataatataatctctaatttactttattacacaaatggtaactccctttaaataaacttaaaaaagaacgtatagaactctcttcttcaatgaatagtaatccaattttttttattaactatacaacgttatgactttaaaaattaaaaaatatgtttatgagtagtaagaaaaacaaaaggaaacaaaaacaaaaaaagttataaagcctatttctacttcctgtataacgaacacaaatggatattattctttatgcggatgggaaagtattcttagttttttttgttccagtctcgttatgataacactccgatcattccttatttttcttataatctgttaaccttcaaagttggtggcaaagattggatcaatttcttagccttaccagcatcgttgataaccaaagtgtacaaagaagaagagcctctaaccttgaacttggtttgtctgaatggcttaccggccttgttcaattttttgttaatcttaacagtggcggtcttaacgtcagctcttctggtcaattccaaaaattgtttgatgtcggtgatttctctagccatttttccttgatattttgtcgtactatattcaacctgaaataaaaaactaacagttgaaatatttctacattgaaattagaaaatttaattctttagattgaagattcaatattgtgcaaaagcgtacagcagcaatcacgactctacatgccatagagcttggaaaactctccataattttccactcgaacgtatgatgctccgtctatttttttcaacagttgcacggacgagtcctccttttcgcaaggcattttaattgtgtgggtttatgaaaatgcacggatgcattttctctagatgaaaattccgtcttggaataatatcggaatgagctaaaagaacaccagtacgcgaatatgtgagatgccctgttttgtcacataacagcggcagttaatttggcgtcttttctgggaagcgagtttatttggcaaggctatgatgttttataatactaatcacgcattgcaacttcacaaagtagttgtgacatgtggatgtaatagcgttacttttctttttgtttattgctatttgtttctattttctttttttaaatcgcgctaatacgtggaaaaatgcgtagaagccgggaatgggacgtgattatgagatcataacatgactgcgagctagagagcattggaagaatttgcttttttgttcagttccctactcatatatttgtttcatagaagtcgtagtatacgtgagacaagagcacttgaaaataaatcttggatctgctgggagcaatatcatcaagtaaaataagggggaaaccatatcaaatgtcagggttcattaagagcacgttgcttggtctaggccaagattacttagaagatcaatatcaagagttcgcagaacagcatttccagccaaccagggatccgttttatgaaacgaataaagatggtaaaaagcaccgccgcagactgccatattattgcactaaggatgaaagtaaagcgtggaaaaaggtccaaaacaaagcctggctgcatgacaaatcactgtgcggatgctgttgctggacaaacactataggatgggcaccattacttgcacttctaccggttataggacccttattgatgtattgggtgcatgataagttgattgaattggcagatgacaggtataaattgcctgcggaaatcaaggtgaagatgcatggtaatatcgttatcgatttacttattagtttagttcctattctgggaagtgtttttgcatggttgcacgcatgttccacgagaaacgcagctatagtttacaattttgttggaaaaagggcattggaaagaaagcaagcggagctcatgcatcaaaaagaagaaaatgagaaacattccaatgccaatactgcacctccagtagttggtggcaacaaaaatgtgaatggaaacagaaataatagtaaaatgtataacagaccgcctgtgacagctccacctgcaccagcatacacgcgcagtactaacggtcgcccccaaagaggttacaggtgaacaaaccggccacggtaaggctacattcttatcaacaaatatgggcaatcaaaaacttataatgtaaattttattttttatcgtaaacatgtatttaagaagtaatataaaggatgtttgacatgatcattttatatatgcatacacgttattgaagttatatggtcgttaaatcattaaaaggcccgtttctttgaaatatgctaacggaatcaaaccggtcgggtcggttagatgtggtattgttgcaaatcagaaagccttctttcattgttttgggagttagagccccttctggtcttgttgaagactgtcttaatttcgccagaatcgattaagtcattaatctcatcgccaggcttgccccaattgcctttcccatagcctcctctcttgacgtggttgggagactccccaaagttgccgttatgggtgaaatactttgggttagactttgcttcgtggactgtccatttgctagttctggtcatgtttgaattgtgtttgtgttagaaatttgtgtgctttaatgttatgttataatgaaatcttattagatttatttaacgtttttgctgtgcttataataaacattacataataaaaggagtagaagaaagtggtagagaggagtacaaatctacctgccagaactctctccttatatatatttccagtggtgtctggattacctacctcaagccataccatatccataccatatccataaacgcctacaaaatttctaccccaatccagcagcttctatcactatctcgtataccaccataggcaccaccactgtttgtgtaaatttactcctgaggggggggtggctcaacacggtgtaggccttcttcccgcacaatccgatgaaaccccacaatcgcctccgtctcttccactgtgcacggcgctagctcaacatcttccccgccacatttactgtggcaaagaaggtgcataatctaaaaaaacatacgtatgagaatggaaagggcaagataatatcggaccgtagtgagtcacttgcttttggtattgcaaccaactgccgcccctcttcccgctcttgcaccaaaacgctaaatgcccattgtgatggctcatccaccctcacgacgaagtaagacccggggcacaagaaaatacgagatcataacagttcgagtccgtttattgtgtgcggttttggtacgctttttcgtgaggtgtactaccattcatgagagtcgttttaggagctgtcatgaaagatatgtatcttgttgatgaactgtaaaaatttgcagaaattgcgctattccgtttatttcattgtcgattcggtgttaatattaggggtacaaaatatactagaagttctccctcgaggatataggaatgcgcaaatgggcatttgatgtgacacaaaatttggacaatataacgattcatttttagatcgttgttcaaccgtcccagtggccgagtggttaaggcgatgcctgctatttcctcagaaaagcaattaggcattgggttttacctgcgcaggttcgaatcctgtctgtgacgctttttttaatttctttactccatgacaaaagcggataaaaattcccgcattcggcgtaaaaaaatccggttttttttttagcactcgctgtttttgcctctaccgggtgaaaaatgacgatgaagacggctggaattgcgctgcatccgcttacgtaggatagaacacctacaaagatttacgaactttattgctcgaagattcgctatccatatctttttagtttccccccatttcacaatgggataccgttgttttttctgtaggtacgctttctcatagttaatagagtcagtaattcatttcattttttgcagaaaggaatttcttcacctaatttagaatttcatcaacatttattgtatctgcatggtataacaaattagaaaaatttggaagggaaaaaaaaactgttgcgtcaattacttataccagggatagaaaaaaaaaaaggaaacatggatcccacaagagctccggatttcaaaccgccatctgcagacgaggaattgattcctccacccgacccggaatctaaaattcccaaatctattccaattattccatacgtcttagccgatgcgaattcctctatagatgcaccttttaatattaagaggaagaaaaagcatcctaagcatcatcatcaccatcatcacagtcgtaaagaaggcaatgataaaaaacatcagcatattccattgaaccaagacgactttcaaccactttccgcagaagtgtcttccgaagatgatgacgcggattttagatccaaggagagatacggttcagattcaaccacagaatcagaaactagaggtgttcagaaatatcagattgctgatttagaagaagttccacatggaatcgttcgtcaagcaagaaccttggaagactacgaattcccctcacacagattatcgaaaaaattactggatccaaataaactgccgttagtaatagtagcatgtgggtctttttcaccaatcacctacttgcatctaagaatgtttgaaatggctttagatgcaatctctgaacaaacaaggtttgaagtcataggtggatattactcccctgttagtgataactatcaaaagcaaggcttggccccatcctaccatagagtacgtatgtgtgaattggcctgcgaaagaacctcatcttggttgatggtggatgcatgggagtcattgcaaccttcatacacaagaactgccaaggtcttggatcatttcaatcacgaaatcaatattaagagaggtggtgtagctactgttactggagaaaaaattggtgtgaaaataatgttgctggctggtggtgacctaatagagtcaatgggtgaaccaaacgtttgggcggacgccgatttacatcacattctcggtaattacggttgtttgattgtcgaacgtactggttctgatgtaaggtcttttttgttatcccatgatattatgtatgaacatagaaggaatattcttatcatcaagcaactcatctataatgatatttcttccacgaaagttcgtctatttatcagacgcgccatgtctgtacaatatttgttacctaattcggtcatcaggtatatccaagaacatagactatatgtggaccaaaccgaacctgttaagcaagttcttggaaacaaagaatgatttgccgtccggaattgcttcgttctttctttcatctttctctttacaatttccaattttcccctacaggaattaattggagggtacaagcgagtagaaatgtgacatatgacttacctatctgtgttttagtatagtttttttttctgtagtataattcacttttacactaattttttcgcctttttctcttaaagagctaatttctataaccttcagcggttataccaaatataaaaaatggaaggaaaacaaacagtaagaaataagcgcaacagcacgttagttcaccattggattccaacatttcaaaatttaatctaatggcaagagatatcacatttttgaccgtatttttagaaagttgtggcgctgtaaataatgatgaggcaggaaaattgttatctgcttggacttcaaccgtacgcattgagggaccggaatcaaccgactctaattcattatatattccactgctaccacctggaatgttgaaagtatgtttctcctagcaaaattaaaacccatccgtgaatgaagcgttactaactataataactggtagctttgtcactcgtaccaggaaaagtgaagattaaactgaattttaaaatgaacgatcgattagttacggaagagcaagagttgtttacaaaattgcgcgagattgtaggttcaagtattcgcttttgggaggaacaactgttttatcaagttcaagatgtaagcaccatagaaaaccacgtcattctcagtttaaaatgtacaattttaacggatgctcagataagtacgttcataagcaaacccagagagcttcatacgcatgccaaaggatatcctgaaatctattacctttccgagttatcaacaactgtcaattttttttctaaagagggaaactatgtcgaaataagccaggttattcctcattttaatgaatatttttcctctttaatagtgtctcaattggaatttgaatacccgatggtcttctccatgatttcaaggctccgattgaagtggcaacaaagttcgctcgctccgatatcctacgccctaacgagcaattcagtacttcttccaataatgcttaacatgattgcccaagacaaatcttcaacaaccgcgtatcaaattctgtgtcgaagaagaggtcctccaattcagaattttcaaattttttccttaccggctgtaacgtacaataagtagcatgcataaaatataatttaatcaaatacttttgggcaattaaaattttagttaacaatagttatgcaatgcgctttatgttcatatgataccgtttataagctattgccatatccttatcttattgcttccagtagcctcgagtcgaccactaaaaagatgtcacttaagacggaaattatgtagctgcacttcttttttaacaagttcggtcggcccttcaagttctcctttctaaagcctcattatttattgcgtagatgctaaatgttatcgcggtttagcttgcatgttacgtttccgttttagaacctggtcgagtagcgaataatgtcttcagttgatgtactgttaacagtaggtaagttggatgcctcattggcgttactgactactcaggatcatcatgttattgagtttcctacagtattattaccagaaaatgttaaagctggatctatcataaaaatgcaagtttcacaaaatttagaggaggaaaaaaaacaaaggaatcattttaagagtatacaagccaaaattttggagaagtatggtacccataaaccggagagcccagttttgaaaattgttaacgttacgcaaacgagctgtgttctagcatgggatccattgaaacttggctcagcaaaattgaaatcactgatcctttataggaagggaatacgttcaatggtaattccaaatccattcaaagtgactaccacgaaaatatccggtctttccgttgatacgccatacgaatttcaattgaaactgataaccacgtcaggaacattatggtctgaaaaggttatattgcgtacacataagatgactgacatgtctggtatcactgtatgtttgggtccattggatccattgaaagaaatttcagacttacagatatcccaatgtttgtctcacatcggggcgagacctttacaacgtcatgttgcgatagatactacgcattttgtctgtaacgatctagacaatgaagaaagcaatgaagagcttataagggcaaaacataacaacataccaattgtcagaccggaatgggtgagagcttgtgaggttgagaaaagaatcgttggtgttagaggattttacttagatgcagatcaaagtatactgaaaaactacacattcccaccagttaatgaggaagaactttcgtactcaaaggagaatgagccggtagccgaagtagcggatgaaaataagatgcccgaggacacaacagatgtcgaacaggttgcatcacctaatgacaatgagagtaatccttcagaagctaaggaacaaggagaaaagagtggacatgaaactgccccagtaagtcctgtagaagatccattgcatgcttcgacggctttggagaatgaaaccaccatcgaaaccgtcaacccctccgtaagaagtttgaaaagcgaacctgttggtactcccaatatagaggaaaacaaagcggactcttccgcagaagccgtggtagaagaaccgaatgaagctgtggctgaaagttctccaaatgaagaagcaacgggacagaaaagtgaggataccgatacacattctaacgaacaagctgataatggatttgtacagactgaagaagtagctgaaaacaacataaccacagaaagtgcaggggaaaataacgaacctgcagatgatgcagcaatggaatttggacgtccagaagctgaaattgaaactccagaagtaaatgagtctatagaagatgccaatgaacctgcggaggattccaatgaacctgtggaggattccaacaaacctgtgaaggattccaacaaacctgtggaggattccaacaaacctgtggaggattccaacaaacctgtggaggattccaacaaacctgtggaggatgccaatgaacctgtggaagataccagtgaacctgtggaggatgccggtgaacccgtacaagaaaccaacgagtttactaccgacattgcctctccaagacatcaagaagaagatatagaacttgaagccgaacctaaagatgctaccgaaagtgttgcagtcgagccatccaatgaagatgtaaaaccagaagaaaaaggttcagaggcagaagacgatatcaacaacgtttccaaggaggctgcctctggtgagagtactacccaccaaaaaactgaggcctctgcttctcttgaaagcagtgccgtcacggaagaacaagagacaacggaagccgaagtaaatacagatgacgttttgtccactaaagaagctaaaaaaaatactggcaacagcaacagtaataagaagaagaataagaagaataagaagaaagggaaaaagaaatgattaatggatgccttcaatgagttccacgacgcacgtttattttttcgactgagaatccctcagcaaatataatctattttttatatatctgtgtatatgtaagcatgtataactagttacaaatatgataactgctttggcgatcacttcattttcttgagaggggtactcagtagccgccaagcacgaaatgtccgttattaaaaattggggagtgaatcttaaaagcccgaaaaggaaattcaaaatctgtctatttataggccgtcgcgctctacgaaaacgcgaaattattcaaacggaaaacggaaaaaaatctaaaaaaagaaattaattgagagatctcacggaaatgccgcgaggaatgtttctcgaggctgagcggcgtggtctgtgcaaaaaaatggcaatttttttgtaggagtttgcattgggccattcagaaggagcaccgttagatgggatggtaaatgaatttgctgtttcagatttgaatcaatctttacccgttatttttgccgttttgctttcataatctgcaaattaacaaagtcataaagaacataaagacatcaccccagtttttacactcttttttcctgtgtttggtttagcacaactttccaataaccaagttggtttcagatcatccccatattattttctagtttcatttacttaccaaactcaccattcaaggctttcaaattaagttacgagtacagtggaccatttttttctgattcttcatattttccgttataagtcttataaggaaggtatacatttatattgcgaatttgaaaaataatttaaagctgactttgcgttttaggtaggctagaaaagaatacaactatccctaaacacattctagattcacgaagacgcctctgcctcaaagacatactatatttttactctcgttgaacaaatagtaccattatttcgctactttcgttgaagattggacatataaaatacgcaaatcatagtatgttgtctttcacaaccaagaatagtttccgcttattacttttaatactgtcatgcatatcgacgatacgcgcacaatttttcgtgcaatcatcatcttcgaattcttcagcagtatctactgcacgttcttccgtaagtagagttagttcttcaagttccattttgtcatccagtatggtttcttcctcaagtgctgactcatcttcccttacttcatcgacatcaagtaggtccctcgtgtcacatacgagttcgtctaccagcattgcctccatatcgttcacatcattcagtttctcatcagattcaagcaccagcagctcttcctctgcttcttcagattcttcatcctcctcatccttttccatctcttcgacatccgcaacttctgaatcatcgacgtcttctacgcaaacgtcaacatcatcttcatcctcactgtcgtcaacgccgtcctcttcatcatccccatcaacaatcacttctgcaccttcaacctcctccacaccatccactactgcctataatcaaggaagcactatcaccagtattattaacggtaagacgattctctcaaatcattatactaccgttacgtacacaccatcagcaaccgctgattcaagcaataaatccaaaagttcgggtctttctaaaaaaaatagaaacatcgtcattggttgtgtggttggtattggtgtaccactgattctggtgatactggctttaatttacatgttttgtatccaatcatcaaggacggactttattgactcagatggtaaggtcgttacggcatatagagctaacaaatttacgaaatggtggtatatgcttttgggtaagaaagttagtgatgaataccactccgattcaccattaggtggtagtgcatcgtccgcaggtggtttagacctagatgaagcagatgatgtgatggagcaaagctcccttttcgacgtcagaataagagatagcgatagcgtattaccaaacgccaacaccgccgaccataataataccaatagcggtggagagcctataaatagtagcgttgcgtcaaatgacataatagaagaaaaattctatgatgaacaaggtaacgaattatcaccacgaaattattaatcatatccattcatatcatttagtgcttatggctacttttcattcctcaattattgtaaattgaccatcttaattatatttctgatattgagtaggtggacttcattagtatttttacaaatattatcaccttcttatgtaggattagcattacataccctctaattaaaaaaagttaacattaattacattttaaaaaaaattgtaatagtatgatagtaggacctgacagccatttgaataaggtttcgagtgctttaacgttccactgattttatgtagttcatatgggggttagtctggtttgaggaggagaatttcagggaagcagtggccgttgaatctccctgtagggcgctgattatttttatcctaataatccaaaaatgacaatgtcaataaagaaaacttaccgagttctgtgaatttctccctaaaaaattactaattatacctgggcgagttttgaactctttggcaaataaacttggggtaaacctttcgattataaagacgttactgctcaaaaatgtgtagaagcataaggagatattctctcgtatgtttaattggagttggcttttttggactctgaagtttgagtatgggaggggaagtaatcgagattagattccctgatgttcacatatggggataaagaatgctttttgggatatgattgtttctttccgtcgttacggttgtaggtgcaacgaattgcgtaagggtggctagccgagatttaatgacgacgcaaaagggaataactgtgacaggaagatgaattcacaaagtttataaaaagaaagggcgatgcactgctacatggttgaacaaggcactacataattcacagcttgtagcttgtaaataaaaagagcattcacgcgatatacgattttcaatgatcactctaagaggaacggcgaaaaatagaattcaatatgaactggaatggcaattatgatcagttaaatatacaatattgttgttgcaattgtattacatttaaataagagcatgtatgtgataaattactgggaatttatggtataggttccaaaacgccaccgcccaaaacattgttattaatgaaataagaatcaacgatcttctcaatcatttttatttaatgggtattgaaatgaaaggattgataatgtaataggaagatgattgacccagaaattatctcaaaattcgcctatttctcagttatattaacctgcttattttaactttaaaaaaaattggaaagtttgcattctacgttttagcttttccgtataaaaattagataatttgacgttcagtataaaaaacgtatcgtaataggtttgcttattggaacgttaaggaaaaaaataataaagaattcatttttttcctttttaacccacctctttcaatccacctatacaactcattattagtagagtattattctaccgttttatacagatcatatcgtgtcttttgctatgctaggttgaaacaaggtaagatacgttaaacgacaacggctatgttgcaggcgaatcgctagcgattatttaaaagatcgtaaactataactgagaaaataaagagacgtaatccaaagtactagcaacactcaacatatataattgtcaatactttaggaagctactatttaagatcaggtacgtagaagcagacgaacagattcgagtttcgatctcctttctgtattgtattggttaggttacatctcggtggaaggctgtcgtatctcagaatgagatacgtcagtatgacaatacatcatcctaaaagttcataaaacacacatgaaacaaccttataagaaaacgaacagagtgagtaacatgagataaaactccgccttccttggctgacccacccaaacatataaatgcctgaacaattaatttggatccgaggttccgcgcttccaccatttagtatgaatcatatttatgtagtatataggataagtaacatttcgtaaatcaagctgataatccattttgacaactggtcacttcctcaagactgcttatattaggattgtcaaaccaccttactatgaattgcgttttgacacaggaaacgctaatgtaatataatccgtgatagtttaatggtcagaatgggcgcttgtcgcgtgccagatcggggttcaattccccgtcgcggagatttttcatttttttttttttgagccacaagaggtatagttcgacagaagagttctattaaagttttcctgttatttcatttggaatataacccaagttgcttttctttgatcataattatttccacctctttaatggtttgtttattggttgattatttcagcctttcttttaggttccttcgcattacattaaaccccgtaactaaacttaaactttaaaaaaaaaatatggacaacttcaggagatagatacaataaagcatctttaaaatttgagcaatgctttgcttattaaccagcaaatgaagactatgaattctaattgctaaacatgttaatgatgctagaaagcaagacaatgttaataaataatacaattcatgcatttagtaagatgtaactgtccaacaaactggtggtacaaggatccttcactgcaattagagtagcgtacgaatgcaagaaaattaataattacaaggaatgttgaacaaaatcagatttgagctttggtaaaattggttatcttcctattattttggttcagaagcagaactgaatagtaaattttatcatcattgtagacaacattccacacttgatttaggtataactttatataatatcactttgaccgatcactaattttcttcaatattgataaacaatggaaataatgaaaatccaggtaatataatgggttaaaatcagatggtgatgcatgatgtaatccatggcacatattccaaaggaatcatcgccggataaaaaaaagacgattgtggtgtctattcatcaaataaaaagttccaaacatataccatttatcaatactatattatgaactcataataatgagaagaaaattattgaaccggatattttaatcagtgtcaaattcgtagcactttttgatgtagtctaagttggaaaataaagaggccagatcataaacgaagaattcctaattcacaatatgtcctgcatatacttcctcagaaaaatatttaaatcattttttataatcacgcttaacctcgatatctcccaaactaaaatcggtatcaaaggtgctcgtaaaggaccatcaaaaaatacctaaataacatcgacgataattggcaatgcttcctagcatacaaaagacaattatcacaacactttttaggcgtggctgaaaatagcagctatttctgccacttcaaaatttgtttggctggcattgttcttagcaaaaaaaaggatagcttttcatccaactcaattaagaaagttagaagatccttatatatgatgaagaaaaattttcttcggatgttggaagagaatgttcgataataatcgttacatacgattgtcactgtagcatttgttagggttcaatcatatatgataagcccaatttgagaccaaaatcgtacattggacaggaccgcatcacgtcagaatagtttttgtgcatctatgtaatataatacggttgaattatccttttataatgatgactatttaattattatatgattaaacaaaaaaaagaagaagacaaacaacttattaccttatttcttgattttatatttattcggaagcagcagctctggtatagatagcttgcttggaatgcttcgagattggcttgatgataccttccttttccaagtgcctcaaagcaattctggcaagagaaccaccaatctttaatctatcaaccaaaacggaaacagagacgtatctgtaagttggaacctccttcaagattctgtcgtatttttcttgatccaaaataacagcgtgttgagctctgtccttcatggactttttggaccacttcttcttggacttcttaccaccagcaagagcggcagcggctttggcagctttagacaattgttgctttggaggcatgttatattatgttctgagacgtaagaaagggtgaaaattgatgttagtgtcaaaaattatattacaaaatacgcagagatattctagttcctttgatgaatgaatctttcagaaaaaaaagtcaaagcaaaagcaaaatggcctgcagactaaactgtatggtggtcttggaatgataaagatctgtttaatagatttagtagatacaatagcacatctcattacccagttatgattgacgtcattctgagttacaatgatcttagcgacctgtgctcattatttgctccactaattctaattttcctcgcctttcatatttcgtatctttattctatatcctaaaatttttttggcaaatcccagatttggctttgattttggcatcggttcggttctttcaaatatcttcttcccgtgaatcaactgcacataccttaataactagttcagtttagtgctctgtctgagtgactgtaataataaattttacaagccacttctcatgacatatattggtaagtaacttcatcaatactaattagtctttgccggttacccatctggcccctgacttgcgatgcttaggaagttccatactcgcggctcttcccaacagtagcacatccgtgaaacttctggcgctattcattatgcagtaccaggacaagaagttaaaaaaaaagctctgttacaagttcaatggtggtgcaaggattgaagttattatccaggaggcacggatgcaaaagatagaagacaaattaatttccttaaaattcaaaatgctcattattgtcacgctgtatgagcatttggtgaagatttcactgggaaatgttgcaataatttgataatcgttcgtattggatgaaactgtaacatcatctgtttattaagtatccgtgttattagtatatcatcacatacggtgtaagaagataacataaagattgagaaacagtcatcaaatataatggaagctgaaatgcgaggattgatgatgtaataggacaataaaaaatataagacggaagaagaaataatcgtaatagcattatgtaaaaatagggatttgaggattcctatatcctcgaggagaacttctagtatattaactatacagaatatcatagccttgatcaacaataaaatcccagcaattatcaaattatccatccatttctcagtgacattctcactagatgagcgtttttgagaataatgctaacatttggtaaggtatgaaataaaatgcgatatcctccgtagttgtcgtccgatatagtgtaacggctatcacatcacgctttcaccgtggagaccggggttcgactccccgtatcggagatatatttaatattttttttgatttgacttcaaatgagaactatttttttaaagcatcgtgtggtaaacaagcttccaccgaatgagcttaagaaagcgcaaacaattttcaacctgacaaagcatacatcatttttcatacaagtccttgttaagtaactcaaaaaaatcattaacgagatggccaaaagagttgccgatgcgcaaatacagagagaaacgtacgattctaacgagtctgacgatgacgtgactccctccactaaggttgcgtcatctgctgtgatgaatagaagaaaaattgccatgccaaagcgcaggatggcgttcaaaccttttggttctgcaaaatcggatgaaaccaagcaggctagttcctttagcttcctgaaccgggcggacggcactggagaagctcaggttgataatagccctaccacagaaagcaattccagactaaaagcattgaacctccagttcaaggctaaggttgatgacttagttctaggcaagccgttagcggacttgaggccccttttcaccaggtacgaattatacataaagaatatcttagaagctcccgtgaaatctatcgagaatccaacgcagacaaagggaaatgatgctaaacctgccaaagtagaagatgtccaaaaaagttccgattcttcatctgaagatgaggttaaggtggagggacccaagttcacaatagatgctaaaccgcctatttcagattccgttttctcatttggcccaaaaaaagaaaatcgcaagaaagatgaaagtgatagcgaaaacgatatagaaatcaagggccctgaatttaaattttctggaactgtatcaagtgatgtatttaagctgaatccaagcaccgataaaaatgaaaagaaaaccgagactaatgctaaaccattttcattttcttcggccacttcaactactgaacaaacgaagagtaaaaatcccctttcattgacagaagctaccaagaccaatgtggacaacaacagtaaagccgaggcttccttcacttttggaacaaaacatgctgcggattctcaaaataataaaccatcttttgtatttggtcaagcagctgcaaaaccatcgctagaaaagagctcattcacgtttggttcaacaacaattgaaaaaaaaaatgacgaaaactcaacctctaactcaaaacctgaaaagtctagtgatagcaatgattcaaacccatctttttccttttccatacccagtaagaatacacctgatgcatctaagccatcttttagttttggggtcccaaactcttccaaaaacgaaacttcaaaaccggtattttcgtttggtgcagcaacaccatcggccaaagaagctagtcaggaagatgacaacaacaacgttgaaaaaccttcctctaagcctgccttcaatttaatatctaacgctggtaccgagaaagagaaggaaagtaaaaaggactcaaagccagctttttcatttggcatatcaaacggaagtgaaagcaaagactctgacaaaccctctttaccctctgcggttgatggtgaaaatgacaagaaagaagcaacaaaacctgctttttcgtttggaataaatacaaatactactaaaaccgcggatactaaagctccaacttttacatttggctcctctgcactcgctgacaataaagaggatgttaagaaacctttttcattcggtacctcccagcctaataatactccatccttctcattcggaaaaacaacagcaaacttgcctgctaattcttcaacatctcctgctccctctataccatcgacggggttcaaattttctttgccatttgaacaaaaaggtagtcaaacaactacaaatgatagcaaggaagaatcaacaacagaagcaactggaaatgagtcgcaagatgcaaccaaagtagatgctaccccagaagaatcaaagccaataaacttgcaaaacggtgaggaagacgaagtggctttattttcgcaaaaagcaaaattaatgacattcaatgctgaaaccaaatcgtacgattcaagaggcgtaggcgaaatgaagcttttgaagaaaaaggacgatccttctaaagtgcgcctactttgtaggtctgacggtatgggtaatgtattactaaatgcaactgttgtagactccttcaaatatgagcctttagctcccggaaatgataatctcattaaagctcctactgttgcggctgatgggaaacttgtaacttatatcgtcaagtttaagcagaaggaagaaggccgctcatttacgaaagctattgaagatgctaaaaaagaaatgaaataagagtaaatacagttaacaattttaaatagaatagaaccctcatattttgtagctcaaggttatagttgagcaaataaagaatacaaaatttattccaaaaaacactacgaatctatattttccagttctttgtctataatagatttggcagcttttgaagcccaagccaatcttctttcatccctatcaaaagctttatctcctttctttcctgcaaggaaattatggtatctaaatttcttgttaataaaccacttcaaacctttgagaatgaatagcatattttccgatttaacgttcttcgttaaaacatcgcgcaaataatcatcggagtagattatacgcttatttccactttcatccatcttgagtttcttctcactttttttagctacagttaaaaataactgaaatagcaatatctccataaataacatcccttctgtgtttaatccacccataaatggaacatgcttgaaaacatctaatttcaaaatgtcattagcaagcaacgatccaaaaaatctcccctgatttgagatgcgaagcagtttttctttatcatctaaatcatcttcttcgtcagtatcgctttcagaatcgaattctttgtcttcaaatttttttatcacatcccagaataggaattgaaacgacttcgataaatggctatacctttcacatattttgttcgcgaccaatgcgtagtaatgattataaccattggatccactatcagccaaaagacaatgtaaaacaattcttggaatttcaagaacttgcttatttttcaagcttaacttttcaagtttactaaatgcatccaggtaatcttgtgcagacataatacttataaatatagcccttcgaatgtcagtattcatacgctgttgtctggcgataatattccaatctggaatatcatcaagaagatcatcctcgattgaaattttagatttcttggacttgctggcatcattttcattattgatcgaaacttcaaaagcattttccatgtttcctcgccaagaagcaccaaccagccaccatttccccttggaatcaatgtttttaatgtcttccagagaaacctgtaaaggctcccaagaagaagaagaattcaaaatgctttgcaagtttttctttaatggatgatgatcagtcgccaaaatagaaggctttaacctgttgtttttcaagtcagacatggtatccattaaaaatctcaatcttgggctctgctcttttaaattcttggcgttcttcaacagttctgatcgtatatctctcagggcggatggatcatcaccccggatcagttgtcctgaaatcgatataattcgtaaaagtaactcagtagtgaattcattaggatctgctacaaatattcgaataatgtcatagattaagcgacacgaaacaaatccaaaattataacaatacgatagtaaggttgcaatattgatgcatattttagaggaaattttgctctgctgatcctttaatatattttccatttcctcttcgtaatgatgcagaaatgcctctaccgttttttgaatgaaaaaagcacccacctcaatacctcttagttttgataatgtatacgcaagagcagcataattcattataaatccgtccaacaacttctgattttggcttataatattcaatatccctttcgttaacgattctgtaacgtactgcctaggcagggaatcatacaatctgtttaaatcagtgataataatagtaatattggagtctgaaagcttattcaaagaggagttgaccttcttgctaatttcagacaaagtactattgttttcactatcatccaatttctttctcagtgatgggggaacatagctctctacagattgtgtgggagctacatagggattttccttttctcttctataattatcatccgagtccgcaacgctgtcgttatcagattcactaagcccatctgagtcttcaaaatcagaagctgaaagatcatcatccgaggaaaatgctttctcgcttgcttcatcatcttttctcatagaattagtttctgtggcaaaatctccatactcttcgtcacttttgccataattttcaaagtattccaaaccttcaagaagtccaccaatagcatcaaattcatcttttgcatgtatagccttcctttctcctttcaagcccaacttttttgcgtaatattgcatgtccatctcgtccctttcaaacgctgatctgtctgaaggggccagcggataactcacaaaattctcatttgtatctctgttacgaatatgtttcttttcatatgagttaccttttatttctcccgagttttcagctccttgtataccctttgctttccgtttcaatgattctagttttttcattgtttcttccgcagacattgcctgctcaccgctttcttctgctacttcatcagtaagcacttcgtcactatcccagttttcattactttctgattcatctgaagaaatcggatttttaccgttagcctgcttgcctacgtttttcacacctgcattagcactcctcttttcggacgttggtgctgattttagccggctggaattgatttctctagttgatataattttacgtttcttgtcggcccgttccatctttctcttttctttacggcttaaatgtttgccatttcctcgtcttctcttttttccttctgaaatagaaaacctttcatcttgactgtagtcaagagtcttcaactcgtccaaaataacgcctggaattctaataccatctgttttttgcattgcctcaatattctgcagctgtggactggctatctttagttaagatgaggcttcgtaagtaagttcagtagtcttgtaagctcatcgcatttttttttttttgctggattttatatttttcacagcgaaaaggacgggaagctaaaagattaaaaaataaatattgcagataccatatgtaatttagtaaaatatttttataaaatattattattttcttgttcttcagtgatttattgtaaccatggagaaatgctcacgtaaataatgttaagtccaatggcacactactaccctttccacttggatacagttttgttttattttgaaagggacgtggcttaggcatttgtgacacattagtccatttaaatcttgaatcatctataacaattctttcatttccagatttggccccaacgatagaattcgatccccctatcgtatacctacctacatcaacatctggttgatttgtatgcgtattatgcttgtgttgcagcgtcgatccacctgtagaaaataaccgttgtttaaggtttttactggggctattagaggtaccggtatccatcgtagatggacttggtggtgggggtggcgacttagtggggttcttcgaaattgattcagtttcggtacgaacggaaagtgtaggcgcaacaggaggaggtgatggtattgatgtagacacggattgctgaggcagacttggtgcactaaatgttggcaatggcggagcagctgcaacaggaggagaaggaggtttttcgagattcgaggagggaagaacatcgtgtaataaagaagcggcggggacattattcttgctatcatctgataaaactggtggaactggtggaggtggaacgtgtccaggcagtgcaggggcctttgcttttttcatccctaacacagtctcactcttatcattggtgtggtcatcacctgatgcagttggagtcggtagcgatgttataggaggaggaggtgcactaggaggcaaaggaggcgccatagcatccgtatgggggggtggtgcgttaaaagcattcgatgatgtttgcttatgtaatttggattcaatttcatccagaaacgacataccattttggctactctgtttaggcgggtttatagatggagaaataggagaaggtcttacgttatcatccttagatgaacctattacatcctcttgtttatcttgggtagtgtatccagtatcaccaccaaccacgaatctatcatctctcttcttttggatctcagcaagaaatggtaagggtcccccaggtgttacggccgaggaagaactggatgaagatattttggattgcttactggacgctgagggtttgtttgtcgtgagtgttggaggaggaggaggagccgatggtactgacgttgcaaccgaaggaggaggaggaggtggtagtggtgctaaaggaatagatgatgctgacaaggcagaggatgttgaaaaagcaccaggtggtgggggaggaggaggtggtggcgcgggcattgacgatgctttgttaggaggaactgatgtagtatttggtaacggtggtgctaaagttgggggaaccggggttgcttttacgctgttagtcgacgcagagctcatggctgctggtagtggtggtggaggcggagctggagctgaagttgcttttttaggtgcagaggtcacatttggtaacgatggtggaggtggtgcagtaggcggtaatggcggagcatgtgatgtaggaatgggcggagcagatgatggaagtggtggttgtgaaggagatttatgattttcggtttgaatctttgtggaagaaacgccctcgacggctcctcgttcagacctcctggcattaatttctgccaaaaatggcaacccgcctgcaggaacttcagaagatggtggtgagactgcgttatctgtaggtttaatgttttttgagtccaggccaattgttggagttgggggagggggtggagcttgtggagggttgctaacatgtgttggcagagacgctgaaggcaaagggggtgctgacacactaggaagagaaatattagagctttttctttggtggcttctgtgtgctggccttactgaaggcatatgcggtctattttgcggtacctttggagcagaggcacctgataatggaagcggtggtgctggagatgatggtacaatgggaataggaggggccgcagaagatggaatatcaggaattggaggtgcagaagacgagggaatactaggaacagcgggtgctggtgataatggtgcattaggaatggggggagccgcaacagatggcaccgcgcccggaattggcggtgcgctcgccgatggagagggtttagtgcttgcattgttattgatatgttttaacttcggtatacctccagctaaaatatcgcccaactgcggagcgcccatcccagggattggaggagctgacatagagggtcctttactactgacggtaccagaacttcctgaggccgatgaaacgacaccacctcccacgattggggcacttctatcattggtctcagctttctttagtttcattccctttctaatgtcacctaacagggcgtcacggccctgcatcacagattttgccggtttaggagcactaccacctaatgctggtggaggcggtggaggaggaggagctggagcacctgccatttcaacaattcgttatatatatggtaggcttcttcaacaaacggttgtgcgctttttagtcgtatgctttgtctcatatcaaaaactttcttcataagtttataattttagattttgttcaagtatttactgactgtgcggattattcttaaggcccctatttgaggacggcggccgcacccgtaagcagtgactaggttatgaacatttcattctttctaaagacgcttttagcaagcttcatacaggatagtaggatttgaaggctaacattgtgattccatcctctgtcaatgtttcgtaacttgaatatttgcgactttttccatcttttgtgagctaaaatttttatcttgcccttgtaatttgaacttaaaagagaatacagcaatgtagcggacaaaccgaacattgaaattaccattttaattgtaacttatcttgaaggagttccataccgtatgttatcaagatacttctcagggcaatatctacatttacatatttgcctgcttaacatccgaacatttcacattttgattatttcgagaaaaaagtcaaaaaatttctcaaagaaaaaagaagtaatgccgaactgagagtgaatgcatcacatcgttgcgaaaaactggtaaaaaatgacttcaagttataagtaaatgaaagattaacaatatctaattctcgattcttttttcaagtttcagccataagatacataagcggaatacctttaaacatcctgcaaacagtctaataaatacgtataataagtttgaaatgggaggcattcgtgaaaagaaagctgaatactttgctaaattaagagaatacttggaagaatacaagtctttgttcgttgttggtgttgacaatgtttcttcccaacaaatgcacgaagtcagaaaggaattgagaggcagagctgtcgtcttgatgggtaagaacaccatggttagaagagccatcagaggtttcttatccgacttgccagacttcgaaaagttgttgccttttgtcaaaggtaacgttggtttcgttttcactaacgaaccattgactgaaatcaagaacgttattgtctctaacagagttgctgctccagccagagctggtgccgttgctccagaagacatctgggttagagccgtcaacactggtatggaaccaggtaagacttctttcttccaagctttgggtgtcccaaccaagattgccagaggtaccattgaaattgtttctgatgtcaaggtcgttgacgccggtaacaaggtcggtcaatctgaagcttccttgttgaacttgttgaacatctctccattcactttcggtttgactgttgttcaagtttacgacaacggtcaagtgttcccatcttctatcttggatatcaccgatgaagaattggtttctcacttcgtttccgctgtcagcaccattgcttctatctctttggctattggttacccaaccttgccatctgtcggtcacactttgatcaacaactacaaggacttgttagctgttgccattgctgcttcctaccactaccctgaaattgaagatttggttgacagaattgaaaacccagaaaagtacgctgctgctgctccagctgctacctccgctgcttccggtgacgctgctccagctgaagaagctgctgctgaagaagaagaagaatctgatgacgacatgggtttcggtttattcgattaagaagtgcaacatgaattattaagttaatttcatatatactattttataattaaataacattaatcctcattgattcattttattcatgataatgtactgtccggttccttgcgctagcctgagttagtctccgaatacctggcgattttcatatattctgagcggctctggacacctaactggataaaaatacttccacttaatgtagtttggttttctagttcatacggactatttcaaagttcatgatttgatgagagaaagtagctatactatcttcccaatttacgcttgtctctgaacaaaggtttttatcctttatatgcttattgaaatactgagaataccaaaagttgtctttttctctactatcgcttgattctttcaagacgtcggatataagaaatgtcacaaaatcaaaaatagctgcgaggaaataatgaagaaaagtaaaagacgaaactactgcttcgatgagaggtgagcagaagctcccataaaaaaaaaaacctatcttgcagtatttctatgttccttaagagatcaatagaagtagaatatgtttcgaaggggagataattcaaattttaacgtacaaaatagcttctttcttcctttggaatacgaatataccgtaaaagataatgtaccttcaaaaaaaaagagtagtataggtttttttccattagatgattctttattcacatcaaaaaacaattcagggcaccataaaagcgaacagctccatcgcggtaatgcagaaactatcagaagccagtttggaactgacgcagttccgataaggatcgatgagaaagaaggaaagtgggatagaattcaagatgataattcttctaatttaaactaccaaattaacaacagtaatgacccagcttcgagtggtaaatatacccagagtattgactgtaaccatatagcggagtcaaaattttcaaaaaaaaatggaaacattgatagtcttcgttcaaactcagcaacttttatgctaaatactgcagatgaagacgtgatagaatttagttttgacgataatgtcccttatgctgagttattatctggtgccacccttgaaaaatgttcgttgactctaaatgaaataaacaaaaaactattcaatacgctctatgactttcgagtaagcaaagataatcccgaagaaaatttggtagaactaatacttccgaactgcgtggtgttattaaacttttttgaagacattgaactcttggccgactcttctgatgaggctttcgaaaaatctactttcattaacacaattgagttcattgtgcacgatatttgggtcgaaacgttgataaagaacataaacttattacaaatgtttgatgcagatttgaaatgctacaatgacaagtacataatttgcaagctaaagggtcagtatccctccacaaatatagtggacataatgtgccgtttgaagcatttttccaattctattttggaaactttcaaattcggaatcgagctaaaagaacaagatcaatgccacaatagaaacactattatcaactacgttcttttcagtagagtattttcaacgattgttttagagattcaaaaatgctttatcttgatcgttaagttcatgtattctgtcaattttttagaaaaattttccgatgaagtatttttgtcatttattgaaattctcataaaaattgtctttgagcaccagattccgcagttatttttgggaattgatgaaattattcaactctggttaaagaacaatgaaggaaaacggcaacaactcttgagcgcttggtgcaacggaactgttcaagatatgaagcaaagccaacaaagagagtcctcaaacgcagaatctgaatcaatcacttcaagtacagaagaggacgaagaaggcctccaattcaataaatgggatgtgattgaaccatttattgataatatcaaggctttgaatcaatcaaaatcccatatgtgacgcagcgataaaaccgcggcatgcaaacatctacacaattagcaagggcaatccatattttgtcttttcgcgccctggaaaggcctaagtaatgtcgtaaacgcattctatctgtacttcaactctcctctgtgcattggtttgtgcaaatcacattttacgatactgccagatttatgcaaaaagagaaaaccaagggaccagaacaaagcaaaattacgataaacttcgaattccttcgtgcttgactaagacaaagggatggacgtagcgatttttagcgggccaagaactggttccgaaaaagcacaggtacaccgaaccctcagctaaggagggacagcaccgatgcggaaggacaaactttctttttgcctatcacagtatcttatcgagctaactattttcgacacacatgaaaaagcagaaatattaacgaaaaagaaaagaaagaccatgtcatgtacgggcaatcagaatctgtaacaagcgccatttttttttctgtatcgggccctccttactgctctccttccgtgtaacgcgttatgaaactctaatcctactatcggcgactctctcgaaatttttcttaacgcgtccttgtactgcgtctaacgcttttgccacttggatttctattataggaaatagtctcacttactgggcgacgaattttcgcgttttgatgaagcacaggaagaatttcttttttttttggcttcttctggttccgttttttacgcgcacaaatctaaaaaaagaaataattataacctagtctcgaaaattttcatcgatccattcgttcctttttttcgattttttcagatcaaaattcttgtttctttctttgtcttagtttatattaaaagatattttgattttactcctgaactatttattctttctaagaaggccagaacactacagctgttttaaccgactacgaagttctccattctcgaacactagccttcatttaccaaacaggaactagcgtatatcattagtccttattcgaaaagagattggtagatatttattgtagtttgtgagaaggagaaaatactgtcattggactgatagttagaggacattaacctctcttacgttcgctcaaaaaaattaaaataagcaagtagctgaaatcaagtctttcatacaacggtcagaccatgaacactgatcaacaaccttatcagggccaaacggactatacccagggaccaggtaacgggcaaagtcaggaacaagactatgaccaatatggccagcctttgtatccttcacaagctgatggttactacgatccaaatgtcgctgctggtactgaagctgatatgtatggtcaacaaccaccaaacgagtcttacgaccaagactacacaaacggtgaatactatggtcaaccgccaaatatggctgctcaagacggtgaaaacttctcggattttagcagttacggccctcctggaacacctggatatgatagctatggtggtcagtataccgcttctcaaatgagttatggagaaccaaattcgtcgggtacctcgactccaatttacggtaattatgacccaaatgctatcgctatggctttgccaaatgaaccttatcccgcttggactgctgactctcaatctcccgtttcgatcgagcaaatcgaagatatctttattgatttgaccaacagactcgggttccaaagagactccatgagaaatatgtttgatcattttatggttctcttggactctaggtcctcgagaatgtctcctgatcaagctttactatctttacatgccgactacattggtggcgatactgctaactataaaaaatggtattttgctgctcagttagatatggatgatgaaattggttttagaaatatgagtcttggaaaactctcaaggaaggcaagaaaagctaagaagaaaaacaagaaagcaatggaagaggccaatcccgaagacactgaagaaactttaaacaaaattgaaggcgacaactccctagaggctgctgattttagatggaaggccaagatgaaccagttgtctcccctggaaagagttcgtcatatcgccttatatctgttatgttggggtgaagctaatcaagtcagattcactgctgaatgtttatgttttatctacaagtgtgctcttgactacttggattcccctctttgccaacaacgccaagaacctatgccagaaggtgatttcttgaatagagtcattacgccaatttatcatttcatcagaaatcaagtttatgaaattgttgatggtcgttttgtcaagcgtgaaagagatcataacaaaattgtcggttatgatgatttaaaccaattgttctggtatccagaaggtattgcaaagattgttcttgaagatggaacaaaattgatagaactcccattggaagaacgttatttaagattaggcgatgtcgtctgggatgatgtattcttcaaaacatataaagagacccgtacttggttacatttggtcaccaacttcaaccgtatttgggttatgcatatctccattttttggatgtactttgcatataattcaccaacattttacactcataactatcaacaattggtcgacaaccaacctttggctgcttacaagtgggcatcttgcgcattaggtggtactgtcgcaagtttgattcaaattgtcgctactttgtgtgaatggtcattcgttccaagaaaatgggctggtgctcaacatctatctcgtagattctggtttttatgcatcatctttggtattaatttgggtcctattatttttgtttttgcttacgacaaagatacagtctactccactgctgcacacgttgttgctgctgttatgttctttgttgcggttgctaccatcatattcttctccattatgccattgggggggttgtttacgtcatatatgaaaaaatctacaaggcgttatgttgcatctcaaacattcactgctgcatttgcccctctacatgggttagatagatggatgtcctatttagtttgggttactgtttttgctgccaaatattcagaatcgtactactttttagttttatctttgagagatccaattagaattttgtccaccactgcaatgaggtgtacaggtgaatactggtggggtgcggtactttgtaaagtgcaacccaagattgtcttaggtttggttatcgctaccgacttcattcttttcttcttggatacctacttatggtacattattgtgaataccattttctctgttgggaaatctttctatttaggtatttctatcttaacaccatggagaaatatcttcacaagattgccaaaaagaatatactccaagattttggctactactgatatggaaattaaatacaaaccaaaggttttgatttctcaagtatggaatgccatcattatttcaatgtacagagaacatctcttagccatcgaccatgtacaaaaattactatatcatcaagttccatctgaaatcgaaggtaaaagaactttgagagctcctaccttctttgtttctcaagatgacaataattttgagactgaatttttccctagggattcagaggctgagcgtcgtatttctttctttgctcaatctttgtctactccaattcccgaaccacttccagttgataacatgccaacgttcacagtattgactcctcactacgcggaaagaattctgctgtcattaagagaaattattcgtgaagatgaccaattttctagagttactcttttagaatatctaaaacaattacatcccgttgaatgggaatgttttgttaaggatactaagattttggctgaagaaaccgctgcctatgaaggaaatgaaaatgaagctgaaaaggaagatgctttgaaatctcaaatcgatgatttgccattttattgtattggttttaaatctgctgctccagaatatacacttcgtacgagaatttgggcttctttgaggtcgcagactctatatcgtaccatttcagggttcatgaattattcaagagctatcaaattactgtatcgtgtggaaaatcctgaaattgttcaaatgtttggtggtaatgctgaaggcttagaaagagagctagaaaagatggcaagaagaaagtttaaatttttggtctctatgcagagattggctaaattcaaaccacatgaactggaaaatgctgagtttttgttgagagcttacccagacttacaaattgcctacttggatgaagagccacctttgactgaaggtgaggagccaagaatctattccgctttgattgatggacattgtgaaattctagataatggtcgtagacgtcccaagtttagagttcaattatctggtaacccaattcttggtgacggtaaatctgataaccaaaaccatgctttgattttttacagaggtgaatacattcaattaattgatgccaaccaagataactacttggaagaatgtctgaagattagatctgtattggctgaatttgaggaattgaacgttgaacaagttaatccatatgctcccggtttaaggtatgaggagcaaacaactaatcatcctgttgctattgttggtgccagagaatacattttctctgaaaactctggtgtgctgggtgatgtggccgctggtaaagaacaaacttttggtacattatttgcgcgtactttatctcaaattggtggtaaattgcattatggtcatccggatttcattaatgctacgtttatgaccactagaggtggtgtttccaaagcacaaaagggtttgcatttaaacgaagatatttatgctggtatgaatgctatgcttcgtggtggtcgtatcaagcattgtgagtattatcaatgtggtaaaggtagagatttgggtttcggtacaattctaaatttcactactaagattggtgctggtatgggtgaacaaatgttatctcgtgaatattattatctgggtacccaattaccagtggaccgtttcctaacattctattatgcccatcctggtttccatttgaacaacttgttcattcaattatctttgcaaatgtttatgttgactttggtgaatttatcttccttggcccatgaatctattatgtgtatttacgataggaacaaaccaaaaacagatgttttggttccaattgggtgttacaacttccaacctgcggttgattgggtgagacgttatacattgtctattttcattgttttctggattgccttcgttcctattgttgttcaagaactaattgaacgtggtctatggaaagccacccaaagatttttctgccacctattatcattatcccctatgttcgaagtgtttgcgggccaaatctactcttctgcgttattaagtgatttagcaattggtggtgctcgttatatatccaccggtcgtggttttgcaacttctcgtataccattttcaattttgtattcaagatttgcaggatctgctatctacatgggtgcaagatcaatgttaatgttgctgttcggtactgtcgcacattggcaagctccactactgtggttttgggcctctctatcttcattaatttttgcgcctttcgttttcaatccacatcagtttgcttgggaagatttctttttggattacagggattatatcagatggttatcaagaggtaataatcaatatcatagaaactcgtggattggttacgtgaggatgtctagggcacgtattactgggtttaaacgtaaactggttggcgatgaatctgagaaagctgctggtgacgcaagcagggctcatagaaccaatttgatcatggctgaaatcataccctgtgcaatttatgcagctggttgttttattgccttcacgtttattaatgctcaaaccggtgtcaagactactgatgatgatagggtgaattctgttttacgtatcatcatttgtaccttggcgccaatcgccgttaacctcggtgttctattcttctgtatgggtatgtcatgctgctctggtcccttatttggtatgtgttgtaagaagacaggttctgtaatggctggaattgcccacggtgttgctgttattgtccacattgcctttttcattgtcatgtgggttttggagagcttcaactttgttagaatgttaatcggagtcgttacttgtatccaatgtcaaagactcatttttcattgcatgacagcgttaatgttgactcgtgaatttaaaaacgatcatgccaatacagccttctggactggtaagtggtatggtaaaggtatgggttacatggcttggacccagccaagtagagaattaaccgccaaggtaattgagctttcagaatttgcagctgattttgttctaggtcatgtgattttaatctgtcaactgccactcattataatcccaaaaatagataaattccactcgattatgctattctggctaaagccctctcgtcaaattcgtcccccaatttactctctgaagcaaactcgtttgcgtaagcgtatggtcaagaagtactgctctttgtactttttagtattggctatttttgcaggatgcattattggtcctgctgtagcctctgctaagatccacaaacacattggagattcattggatggcgttgttcacaatctattccaaccaataaatacaaccaataatgacactggttcccaaatgtcaacttatcaaagtcactactatactcatacgccatcattaaagacctggtcaactataaaataatacaatcaatacttgcttgaacgcttgattttactgatattctatccaaaagcaagtagaccagaaactctcaagatgttgcaaataccgttcgatgtttttggtttagattgttttaatgttgatgcttttttacttatttttggaagcgtctttttaatttagttttatattataggtatatgaatgtgtttatgccaataagggtttttttgtacagttatgtgattataaacagtcttttgtctagtttttttcaccagtatcggcctctatttataaaaaacggagcagctttcggtgtcagtaattctgaaaaaatttgtgtcactctgattgtaaatgaattaatttagctagatagttgcgagccccaacgagaagattgtcagacaaagacaacattcaacaacctacatccgttactattcgttaactcgaggtacttgaaacttttcagttaagtatgaacaagaaacaaaatttttacgcagccattattgtggctatttttctttgtttgcaattgtctcatggctcttcaggtgtcagctttgaaaaaacccctgctattaaaattgtaggaaacaaattctttgactctgagagtggggaacagttcttcatcaagggcattgcttaccaattgcagagaagtgaagaggagcttagcaatgcaaatggggcttttgagacaagttatattgatgccttagcggacccaaaaatatgcttaagagatattccatttttgaaaatgctaggagtgaacacactgcgtgtttatgcaatagatccgacaaaatcacatgatatatgtatggaagctctatctgccgaaggaatgtacgtcctattagatctttcagagcctgatatttcaataaatagagaaaatccatcttgggatgtacatatttttgaaaggtacaaatctgtaattgatgcaatgtcatcctttccaaatttgttggggtattttgcagggaatgaagtgacaaatgaccatacaaatacctttgcatcacccttcgtgaaggccgcaatccgagatgccaaggagtatatttcgcattctaatcatagaaaaatccctgtcggctattcaactaatgacgatgctatgacaagagacaatttagcaaggtacttcgtttgcggagacgttaaagctgatttctatgggataaatatgtacgaatggtgtgggtattccacgtatggtactagtggatatagggaaagaacgaaagaatttgaaggttatccaattcccgtgtttttttcggaattcggctgcaatcttgtaagaccaaggccattcactgaagttagtgccctttatggcaataaaatgtcctctgtttggtctggtggccttgcatacatgtattttgaagaagaaaatgaatacggagttgttaagataaatgataatgatggagtggatattcttcctgatttcaagaatttgaagaaagaatttgcaaaggcagatcctaaaggcattacagaggaagaatacttaacggcaaaagaaccaactgaagtagaaagtgttgaatgtccacatattgctgtcggagtttgggaggcaaacgaaaaactacctgaaacacctgatagaagcaagtgcgcctgtttggatgagattttgccctgtgaaatagtcccttttggtgctgaatctggaaaatatgaagaatattttagttatttgtgctctaaggttgactgttccgatattcttgcaaatggcaaaaccggtgagtacggtgaattctcagattgttctgtcgaacaaaaactttcccttcagctgagtaaattgtattgcaaaatcggcgcaaatgatcgccattgtcctctaaatgataagaacgtttacttcaacttagaaagcctgcagccccttacaagcgagtcgatctgtaagaatgtttttgattctataaggaacatcacatacaatcatggcgattattcaaaatcaaatccatcgcgtagcaaggaaagtttgaacgtaaagtacccatcgagtgaagagagagaaaatgacggcaccatcgcatttaaaacttcagggtttgttatacttctaatttctatgatagctgctggaattcttctataaaaaattcatttaatattcaatgaagttataaattgatagtttaaataaagtcagtctttttcctcatgtttagaattgtattaatgtacgccgtttacgttggagtgtaaatgtgtctattccagaacgaaatctaaatgagcagtacaggcagttcagatggtactgaagcggtactaaagatgcatgaattgaacagatgtggtagttatgtatatgaggaatatgagttgtcacattaaaaatataatagctatgatcccattattatattcgtgacagttcgtaacgttttaattggcttatgtttttgagaaatgggtgaattttaagataattgttgggattccattattgataaaggctataatattaggtatacagaatatactggaagttctcctcgaggatataggaatcctcaaaatggaatctatatttctatttactaatatcacgattattcttcattccgttttatatgtttcattatcctattacattatcaatccttgcatttcagcttcctctaacttcgatgacagcttctcataactcatgtcatcatctaacaccgtatatgataatatattgatagcataaccattagttgataggtgatggtggaattttatttcaacagttttatacctctcttatataagcacaggaaggtccatatccacatttaaacttgattaatacttttttttatacctttaactatcatcatcaataatttcttttctgaaagtacgacatcaaagtcgccgagttttgtcttcggaataaatactaggtcagatgaataaagagcaggaatttactatctctgataatttattatgctcctctagtgcaatggttagcatgcattcttccggtggctgtgatccgggttcgagtcccgggaggagcttttaattttttagcgcactattctaatttttaaggaaaaagcatatttccgagtcagtgcatagaaagaacggaggctacgatgccagcacagtgtctataaagtcaagaaatacattcaaactcttcgcgtaagggctgtcaatttttcatttccctcaaagttaatgcgcaagagttaggatgatcttgattattagttatttgtttgttccatcaattatgccgacgtccatgaatgctattgaagtatcgattacttatgctattctattgtatttgagccggcggctagtaaacaagacagcatacctttccaacatccgtacatattgattattgtatctatgattttcatgtaatgtatgggttaactaatcctttctcttcttttttttttttctgaaaatcagtagctagaggaacctgttcgtgaaagatatggaatattccgtctagggaagagccgagagctgagagcagtatccatcggatggaatcttgcctggatgcgtaacgacgacagcttgtctagaaggcgaagtacaagatactaagaagactataacaacagaagacaattttgtagtgcgattctatattattgacgtaaccaacaaaaaagtatcagaatggctaaacaatcattaggtatgtgcacaaatgctaaatcactgaaaccctgtagagctggaattgaaaatatagtttgtaccttttgcctgagggcagaatgactcaatgttatcttaattcgattagaaaaagaaggtgcgttatccaaggttgaaacttgtaaactatttaggtgatgtctcataactgcaaccactggaaaatgacgcaaatatcaaaataatagggagataaagtctcacgacatgaaaaaatcatagaattattgttcaatttatctagccgtatcttaccttatggaaaaagtgtgaatatgtttttctaaatcgagcttcccggaaattacactatattatgcatccgtgatacatctgaaattcaatactttctccaaggtcctgcttactaagagggtaagatttgttgaaactcgaaatactaacattattttcattattttagacgtttcctccgacagaagaaaggctagaaaggcttatttcaccgccccatcctcccaacgtcgtgttttgctatctgctccattatctaaggagttgagagctcaatacggtatcaaggccttgccaatcagaagagatgatgaagttttggttgttcgtggttccaagaagggtcaagaaggtaagatttcatctgtttacagattgaaatttgccgttcaagttgacaaggttaccaaggaaaaggtcaacggtgcttccgttccaattaacttgcacccatccaagcttgtcattactaaattacatttggacaaggacagaaaagctttgatccaaagaaagggcggtaagttggaataaattatgtaattccctgaaaacttcctcgaaatttattgcactttttttactcaaaccatttaataatcatatgtaaaacgtataaaatagtatccattccactgtactcagtgtcttacgtaaagggctgtatactggcactaccttttactatggatatgtgctagctttttcggagaagaaatgttcgccttacgctagaaaccggggttaagggggcgtgagaatgaatattggcagacaagaaccgagatagaatcttaacacaaaaacagttcatcctacttctacgcctttatacagttatactgaaagatctttgcataggggcatagtttaaaataaaatatagggttgtcatagcaaacatgccaaatgtgctttctgatgatgaagagctccttaatggactaggaagtgagattatgaaaccctctagacaaggtaaccatatggcaaggaccgtcaaaaggtgggtaaataaagaacgtgctaccacagccgatctgaaaaatgttaatattgatggagttcatggaccggtaaataccgaaagttatatatcaccaggacagctttactccactgactcgggcaatttatttcatgctggaagaatccttgtcgttctagtcggtcttccagcaacatcaaagacactattgtcagtagcgattacaagatatacaagatggttaggagttaggacgaaatcgttccatttttcagaatataaagaatcagctaaaaatataccctcagactatttttgcgtagtgccaacgtcaaaagaaggtgtagcgtttgttgaaaagcttcgcatgcagatgttgaatgatatactggcatttttcaacgacttgtcaggtcagctggccatttatgatgccctaaacatccgtaaaattgacagaaagaatttggagacaacgttttctgaaattggagttaaagtactcttcatagaatcaatcgtgtctgatcaagaaatcatgaatagaaacatagctcttgcactggagtcgaacgattacaagggactttcaactgatgaagccattgacgaatatatgagacgtttatcagtgaacgaaccatactatgaaatgatgacacatgacgaagaattatcgtacattaaatatataaatttgggaaagcagataattgtgaaagataacatacatggttatttggtcaacaaaatagtatttttcttaatgaatttgaggcagaaaaaggggtgtgtatattttgctcgctgtggcaccagcgataaagacaactacatacatgatgaggaactaaacgaggagggaatccattactctcaagttctcaaggattttgtcctccaacgaattaaacagaagagacaggccaaaaaaaattcggattccttagtcgaagtaatagatggaagtcatgatgaagatttgaagacttccttgatagtttggacaggtcccaggaaaagaacccacgatactgcactctttttttcaaaagaaggtattaaagttcagcaacggtcagagttgagacagttgaacccaggaagtattgctgatcttactgatcaacagataatggacaaatttccatcagaatataaagaatcattaaaagacccatatcattttcgattccctagggcggaatcttaccatgacttagccgttcgtatggaacctttactattagaaatggagcatacgagcaaggacattctcatcattgcacatgagtcaacattaagagtattatatggctatttaatggcttgcacctgcgtagagttaccaaatctaaatttcacaagagacaaattagttgaaatttcattcagccctttctgtaatactgtagagttactgaacattcctttaactagctaatatactggagttgcatcgttgatgtgtattatctatattcaaaatagttatttttatgtttaagaaaggattaagaacaattgaaaaaaaattaccattagcaacgaatattaaattgtaaattatttagagatatttttctataatatgctcgcctaccattctcttttatacaatatttaggttttacctggaggctaaaatgatatgaggggacgatagcttaacatgattgtgacacaaactttaaaaaaggctttcagttgaagagttttcttccgctatagtctccaatgctatcttacttttcttattacgtttatgtctacctttcatatcatttcttgtaagcaactcctgcatttccgcttcctgggcagccttgagtaaatcatatctggtaattttatcaggtttattgctcacatatctgcctgaaccaacaacgttgatatatttccatggacatgctacccactctgcaatagtggaagctgaattgattgtgttttttgaaactaacccgatgggacaattactgatcgattgcattattaaaggtgataaataatcctttgttatttgtgccccttaaaattcatatacactttatgtttaattcgacaggtataacagaaagaaacaaggaaaacaatgcaattaatcattaactgcaccaacttttatatgaatatattgtgctacatgtcttaattagtcctctgtgaatgagcatcacaaagaatcacgaggaaaagattgattacttaatattgataggaatcagccgcggaaatggaaatcttggtaatataattttaatgcggcacgctgaaaattgatggcggcctgctaggagccctattgattccgcggaaataggcggattattacaaacgttgagcattcagcaggtgcgctgtgccttttcactttcagctaagatgtttgcaagcaagaattaacagataagccgcttcgctagtaacgcaactcattgtgtttttaatggaagctaaggatggttgaaattatgggtaccctgagataagattattaactatgatgtaagtattaatcattataataaggggtacctgctcattcgcattaccatacattgactattaacgagcagaaagtttttggaagttttgcagatgaagtgcatgtttgataatttgaatatgcggatttccttattcaaaactttctttatgcatagagctaattaggtttgagttaaggaaaaaaatctatcataagtgtcttgaggtatttactataatgtatacgggaaatattaggtgtgataggctctaggaacgaatattaatattgggggggggaaactggaatgaaattaaacaaaagcaaaaaaatctaaaagaagaaaaaaaggagagagagagagagagagagagagagagagagagagagagagagagagagagagagagagagatgagggttattgataatataatataataataaaagagaagatagtagaaaaggaagaaagaaaaaaaaaaattaagatgtactttaataaaaagagggaaattctaaaaagtgcgactggaattagaagaatgcaggtattttgttttctctcctatgacggagaaggtaacaaaatcataaaggtaaaataacaaattaattatgatcaaagagaaatgccctttgtaaaccgtggtttgtaaatgcgttggtaactgcagcagatgttaagaaacaaagatggaaaagaaccaaaatcagcttgtaagttctatcgtaattataaggataattgacgcttctgttgctctctagcccatcttgctgtatcttttgtggcttgactgaacaattggccactcctagttcttttaatgtaatcaataacccagtcttgtccataaaattgtttgattgagccgtctggaaacatcgctgctatatcaccaatcaatccgactgctgctcttgaggtagcatcctcactgtacagctgaggatcttctgcaacttgtgcaatgaactggaatatagtaccaacataagggaacagagcttcaggtttatcatgaagacccgctactatacccacataagcatctagtactgcttctagtacttttatttgataatcaagggcttctaatgtgccgttttccggcttcgtgttttgggcagcaacacacaacgccatgatgtcattcaagtagggaataaaatcagcacctatattggaagcaatatcaccgaacacgctcaagacggctggtttcaactctctccttgcatttggattagagatcatttgagccaagacattcatcatagcatcggaatatcttctgaaatcttcttctaacgaatttgaaatatcagcgatgaagcccactgcggtgattgaaactggcgaatctacttgatttaaagcctttaataaatagggagaaaatgtttccaggtatttctcaaatcctttacccaaagaagcagctagagctgaaatagcataaaacacatcgtcttcaataaacgcagagtcctttttttccaacaacctgaagaacagtcccataagcatatctgcaaccggttctacactacttggactttttctaataacggctgctagaacagtcaatatatttgactgcaattcttgcaaactttgcgcatcttctaacgttaattgattttcatcaacactcattgtctgccctaatttgtccataacaaacgtagaaatggaggcggaagtttcagctaccgtgtccgtggcgtattcaaccattgttgtcaaggctgaaaaggcggatgcacgggcattgaactcattatcaattctatttgcagcaccgatcaaaccatctacaagagcgggatagaagttatagattggagatggtgtggcttctgctaattgttcgactaagttgataatggtccaagaacagtttgtggccacttttgggtgatcttgcaacccaattaaacaagcttgaacgacacctggaagatgctgttgtgggtcgatagattcagcaacagaatcagcaattctaccaatacaccaagcagtggtttccttaacttgtagggattgatcgttcattaaattcaaaatagatggtaaggcttggtgaacgtaataggttctttggaccttatcagggccatccataatggaaccaaaggccattacagcagcttcacgattcctccagttgtcagcggtaatattttgttcaacaaattccaatacaggttctaagatatgattgccacagttttgggcaaacaactgcaagcatgcacctgcggacatggaaacattccaatcgtcatcttctggatcttcattttgtctcgttagaaggttcaacaaattggggacaacatctttaatagaagagagagcgaaattataactctgtaaaggagattgaggaaattgagcgagctcataggcaatatcgatttcttcttcacaaatagtggaccagaattccacagtcatggaagctactttatcatttggagatttcattgtagctatggtcaatgcatatagggcttgctccatgtaaggtttcataaatgtatagtatagtgacatgattttacacaaacaaccaaaggcagctgcttgaacttctatatcttcagcttgagtggcttcacagacgacttgcataaggtagtttctttcaccttcgcgttccatgttatttttgatgaaaattaaagagtctgcaagagcattcagagctgccagtctgactgctttggaagtttccgtagattgcgcaccctggacaatagcgattaagatattgtttgatgaagaaactaaggcttgactttgagggtctgcactttcacacatataacccaaggccaataaagaggctctcttgacattttctggttgttccgcacctgtattgtcaaccataattttcatcaactctggccatgcgccatggggcaactcaatatctgctatagccgcaatcaattgagctgctgcatttgctatacgcggttctatggagaccaatgcggtcagcgcgttagttttaatttggtttttagcttctggactaacctgtgtaatccaacgttgtgcaaattgctgcgtcttgactgagtccttggacaccagctcgttcttcaaagttagcgccgctagaatacgcccttctagctttgtattttcatcgataagcacttgcgaagaaagacctgcaaattgtaagaagttgtcattagataatttctttaattgcgtttcactagtcaaccgaatgttttggtcgggacttaagatactgttctccaatagttgagcaaattcagcggtggacattgctccttgtgtgatatgatggattactgttaaatcagttttattctacccctaaaaaccttgcaaatataaagagaaaaaggacagataattctccagtaatattatcctttacttcttaatgatatctgttctttaagcgaaaaatacaagaaaagaaactggagagtttacgtatatttgcctctcttcgcagttatttttcttttttttttatttttttttccttggttctctcatccaagtttttccttattgcccttccagcaaaattcgaaaattttctttctcgccaaagaattctatactcgtttaacatgatacatttatcggaacatcggtaggaagtggcctgcgactgactatccatttgatcgctgcatgaggaatgctggttatctatgtatcgggacatggttgcaacgtttccaacaagaacaagaatagaaaaaaaaataccgaaagcgtcctttgcgttatacctaccaaccgtgtacaagctttactcttcttgctttctttatttgctatgtatctttatgtttatatgtatataaatctgcctacttgtcttcctttggcatgccaaccctatgttttttcaattgctcaattgcaaagaaaattaacattgtgaatggacccagtctagtgaaacttggcaaccacccccggaacatgaaagatgggccctctttgcggacagcgtcggcaaggatcttcaaagccggttgatggtctccgctgccgttcatgatacgtgtcttcatgacgtctgctggagagcacacagtggtggccaccaggccagccaacagggacgctgtcaagtgtgtatagttcttggatgcgtcgaaatctaattttgtgaccaagtagttcttaaacacgtcatacgtaacgacctgacttgccgtcatcagtatgcccctaaccatgttaggcttccaaccggtaaacaaggttttcagtccaccctcgtagcgatatatcttgtacacaccatcgatagcgtttttgtagtttctcctcttcgctgcctccaaagcagagtcgttttgcattctgatatttacaacatctgcaaaattccctgcaagccccccaatggcaccactgaacatggagcaaggtaaaagatacgccatgttagtcaattgctcgcgtgggatcacattctctttcaacaagtcgtatgcaccgaatctcaccgtcgtgtatgtacattgcctcaacacagcagcgctcaggccggaatataaccccaccacaccttcattcgccaagatactctccaacatcctgaagagtgtgggcttgggcataggagccgcctgcagtctgactttggccaagtcaagaggatgtgtcaccatggtagcaaagatacccgctgcacctccgtaccaccatggatacttgatattcttaccggcagactcttttgcgttggttgacatgccgtccagctgttgcgttatcttttcgacactttcagagcaagagaaacgaacctctacacataaatatgcatacgattatgtatatccatatatatatatacactacaagccgaccgcccgaccgtttcctgcccccaacattgcagcgtaatcgcttgccaaagaccacaccttgcagcccttttatacaaacatgtctacgacgtacagtggagagggccctttccttggcactcaactgagattgcgacgcgataccttctgcgaccgttcctactatcgcggccataactccaacaacgacagcggatgcgctgttctgcggatgcgtgaccgtatccgcaaagaacgaagattaaatttagggtccccggcattgaggatggttctgccaagaactcacgatataaaccagttggttgagcatcgcatggatgagtatggcgtattttgattgctcatatatagtgggggggaatactcatgctgtgaaaagcacaactcttttcactcaacgaggttaatgccttctttgtctccacgccgtttttttctggcgcccttttgagaaagatagcctgtcccgtaatcgtggctttggcagagacagagggtgagcgaaagagcgggcgaaaccgagaatggattccgagtaaaggattgcgatggcatgaaacaaaaccgagaggcactccttgtaaggacacacatacacagacgtaaacatatatatacatacgtatactcaaatatatcttcgtatcattaggtcagcttctctcttccgcacgtagaattagagaattaacgcaagactataccattataaaaacgcataagaaacagtttcatcatgattgaccgcactaaaaacgaatctccagcttttgaagagtctccgcttacccccaatgtgtctaacctgaaaccattcccttctcaaagcaacaaaatatccactccagtgaccgaccataggagaagacggtcatccagcgtaatatcacatgtggaacaggaaaccttcgaagacgaaaatgaccagcagatgcttcccaacatgaacgctacgtgggtcgaccagcgaggcgcgtggttgattcatatcgtcgtaatagtactcttgaggctcttctactccttgttcgggtcgacgcccaaatggacgtggactttaacaaacatgacctacatcatcggattctatatcatgttccaccttgtcaaaggtacgcccttcgactttaacggtggtgcgtacgacaacctgaccatgtgggagcagattaacgatgagactttgtacacacccactagaaaatttctgctgattgtacccattgtgttgttcctgattagcaaccagtactaccgcaacgacatgacactattcctctccaacctcgccgtgacggtgcttattggtgtcgttcctaagctgggaattacgcatagactaagaatatccatccctggtattacgggccgtgctcaaattagttagttggctctgcctatacgcatatatgtatatatatatatatatatatgtatgtatgtgtatatgtatatgtacgtataccttacatcatcatctttctttatattctctctaatgcgcatttacatcggagtacacgtcaaatcttctttgtttggttaagggtaccgcttgtctaaatgactcaatgacttcgggatctaattcagcataaataatctcttctccctcgccagcttcagctacaatcttgcctctagggtccaccactatagagtggccatatgcatggtaagaactctgtagattccttgcgggagaacataacatcacgtacacttggttgtcaactgccctgcttcttgccagtaaatgccaatgcaagggccctgtgacagtgttgaatgcactagggtagatcatggcaaacgcacccttgcgtgcacttagcattgcgagttccggaaacctcatgtcatagcatatacctacgccaaacttaccatatttcgtgtcaatggtagtagacttctctccagggctcaaggtttcactttcatggaacgatataccgttaggaatgtctacatcgaaaagatggaccttccgatgcttgtcaatcaacttgccatcctcgttgaaaattatagaggtgttgtagattttgtctgtctttggatccaattccggaattgttcctcctaccaagatgattttaaacttattggctaaattagacagaaattgaactgacgtcgaaggctctttcggattgataacttctgaatactttctaaactgatcagtggagtacggagaattgaagcattctggcaatacgaccaacttggtatccggctgttccttcatagccctttcaatgaacgttgcagccctttgaagattggccattttgtcaggactcgagcctgacagttggaccaacgcaactttaattttttgtgaaagaatcttcgaagcactcatactggcgatcttcacgccctcctgctactacaaaagctgtgtttttacaagaatcaaattaagttagcaagatatcatacaacattattgataattttaatatcgtgttcgtacctgatgacgtatctgtgcattgataaggcccgcatggtttcagaaagcagagcgggacgattccaaattagtggccttgtgctttgcatgtcaattgtgttaccttcagctcgtggatttgttttatcaatacacagtctacagtcaagaatttttttttatcaatttgtgcgttcgagcgtataaaatagccgctgtagctacttaagttcctgttcagcgatagtttttttccatcacacgtactatggcaccaactttgtactattccttccccgtttactcaattcttgaagccaatttgtacaattccccattagagtcaaataaaaggatgcctcacggaggtatgttacccgcgctatttcacatggctcattgaattagaggtggaatttggtgtaccctcccctcctcatctgatgaagtagtgatccgacaattcttaaaagttgtagacattactcttaccaccaactaagttgtatttatattgctacccttatccttttatatctaactagcgcttataaggttggggcaatactaaaactgtgatcttattcagctcattaaatacgtggcagtacgtaccctattagaaacaataggaaacaacagagtcggaagaagccaaatgccagatttgaagtccaagaccttgtcaagccaatctttgggagcggctattcctccagaaattgtgtaccaaatacttacataccagtttagggatttgttaagaaatgaccatccaggtacggcagaaaagtttaacgaaaacttaactacatttgtcaaaagtaatttaactgttaataagacattctcccatatttgtcaagttctcatttatagatattgtaatttaactaccgcaaagagatttcacggtcttttacagactttaaagggaaatagatgcctttgcaataagattgaagtagccgatttccaagaattaacgtctattggactggggaggtccagtgagatgaataaaatgattaaaaatctaactaacgaaactcttcttgagtttctaatgctcacaaaagcaaacttaagggaattcttagcatgtgaaaatattcaagacgatttagacgataatatcataaagtatattctatctccaggaaaagtcttgagtgtagtggatttctgtggctgttcaggcaccactttcacagaaagttttattaaggccctggataaatactaccctaataaatcgattgatcagtaccggctggaacctattcaacaaaattatcagattacctgcttaggcctaaatgattgtattgatctaccatcacacgtcctttggaagatcttaaaaatgttaccagaactacaaaaacttgatttatctcatacctccattgatgatagtaccttatatcacggcatacctcactggaaaaatttaactcatctttccctcgctacttgtcttcaagttactccaagagcggttctggagttttttagtcatcacccaacaattacagaccctgacaacacttctacattagaatggctgaatgttagtgtcattgcccattcctcatcttggaatgaggtgcacacaatgtttttactaaaaaaactttgtcaacatggccataacaaaactttgcaatatctaaatatcggcggtttaccgcttcatgttgcaccttctttcggcgaggaccctattagcgaatccacttattattaccaatgccgcgatagcttacagttcataaagtggaattttccgaagttaaaaagtttgagtataaaaggtaatagtatcccgatatctacgctcgtagaatttttgacaccaattgatcaagaccatcctaattgtgctcaaaaattgaagtttttgaatatttctggtaactcttatgtgaataaatggactattcaggactcattattgtacacttgttctccaagtttagtcgcgttagaagtttcctttgactcgtggcaacagattgaaaaactaaatgatagacatgaaattattgcatacagatataaaaacccaaattcggtaattaaagatatttcaacagcagaacaagtaaagtggaaatgttacattgattcttcttatggtaggagatattggttatataagactgatcctttcctgaatcgtgatgacttggattctaagtcaaatttaactaggtatgattttgagggtcacaaaatcatagaaattataaaccagccggatttcctaaagtttgcccaaagtaaaatcatgcttggatgtggtctagttcctcaaagtggtattagacgtaaactatgttacagagatttaaagccaccagtttctcaattcttaaatagaaaaggtgcgatcagccttggtgatactccactaccaataattaccccaacattacctcgtggtgggtggagaatcatccataatgaggacgacaacaacagtcatgtggaagatagccaaaatcacgtgaatgccatcccaagaaggaattctctgttgagcagacccactttaagaagcaacaatggttcttcctctgccaacccctttgctatcaatgtttctcctgcatctcaaatcagggatggtttgtactgggataggtcggtccatgatttacgtgagctatcattgcaagaacaaagaattcaggagttagctgatgagcagcaggaactaagaacaatcgcaaactttgaagagactgacgacgaatatttgcacgatcccgacttgcaacggagaaggtcccaacttcacttatttgaaagttcgcgctcacgttcaggaaataaaacaagaccaagtttaactggtgaacactcgtcctcggcatcgtttctatccttctcccacttcaaccaccttcacaagcgtaagaattattatttcacgcatcccgatgaatttgtctatgatccaaaggatcctctgacgactcaaagatatagattacattttgaaatagtcaacgaatatcaagtttttgggtgcattgagcgtggaatgtatagatactacagtttaaaagcatagatatttttctctttacttccttacccttcctccgctctcgtcttgtgtcttgtatatgatttctatatatggtaaaatattgcatacatcgtctaccatttagccagacttttcggaaacgaatttaatgattgcagcaaattcccttcccctatcaactgattgaagaatgcctcgaaacgcaatgtgatttttaagttttccatttttttttttttcataagggaagcctctctcctccgaaaaaggtaaacattgcgaaaaatgatccaaaagagagaataaaaaaacaattagaaaatgatttactcatccgcttactagagaggccaaaccggatagtcctgacgctaataagagtaggattaagttcattgtggtgtgtttttttattgcgcgtaagcgatacctgcaaaattcattataattttcaatcaccttccatcaattatcaataccccatactaagaacaggcaattggtttaggaaggaaaataataaagatatccaaaaacaactggaagctttccagtcgcgacctctgttttgttcgaacttctagttaacaaaagaaagaccattcaattgcttttttaatattcattattgacgatttttatttctaggcgattaccggtatacttttcattcttttgataagataataaatccaattacattcgcttattttaattcaatttagactataactttctcttaactctaggagtttctttcttgaatcgaagcatttttgacaatacccaatatcctctttctacttgagaattttttcgattctacatgaagtatgatacaatcagacgaagataatttggactcttctgaaacgacagcatcaacttcatatagtggtacttcctctgtatcatccagactacaactaagaacatccttgttttttgaaaatcttaatggagcacatgggaaccccgatgcggagacagagatggctactgttgcctatgaaaccacaagtagaggtcaaggatttgctgtatacatcaacaatgaaaggttttctcaaataatgggagcatccacaagctctagctctagtagcaactcgtcctctattacacaatttcacgatacccaagataataatataccaagcaacactactgtaaggccaacttcacttcgacgagacaacgaggataccgtaccgttaaggaacgtaactccttcacaaaacgcggcggtacggccagaaagagcagtgaattcaccatcttcgcagagattaagttgcgcactgacaatatcaacttcagttcttatgggagaagatgttgaaggaagccctatagagcaagagcatagtagggtcgtatcttcattatactcatctttggcgaatcgcgggaacgacgagtcaaagaatggaacacctccacgtcctacctcaattgaacctaatgaaacaacggaacactcatttttctcataccattacgatgacaccttagaaccagatgttgaagaggcagtgaggctaacgaagaataaaacttctaatgttaattttataagctcaactggcagtaaaggtgaaggcgagaccgaggatgaagtcatagatcaatacgaacctgtgaatgaatcaaaatttataccgcacaaactaaaaattccagagaaggctggatcaataaagtcgtcgacaagtgatgattcgcattcgccaggtgcgccaggtacgtcggcaaggaagattaaaattcctcagagtccatcgttaattggtaacatattgattccttcacacaatagtgacagtagtaacgaaagttctcctaaagaccatatagggcataataatgaagaaaaattcagttcaaaatctacgcgcaagccctccacatccctagaagaagaaggtccaccaattggactaccttcaattcccgtattaagaagtgtgtccggaccaagcaaatggacgaagacacctttacgcttagaatctggaaattcaactaagtctgatccattttcacgctatgaaggacacaagacgccctctccattgaccaagatgaacaagaagaaaaataaaacgttgccagaacatggacaacccctcgtgctagctccaattaaatctcaaagctcggagtcagacacgggacagaactccattatagaaaagccagctcgaagcatacgacgaaagcaacaagaaaaaactgataataggaaagaagacaggcacgatgctgaaaatatagacctggaggcgagaatgccaattcaacatatcgataccgcttccattcattcgtttgattcaggtcaaaatggattcagggacgtttacagcatcgaaaacatcattgtgatcctcctatgttgtagtatagtgccgccattattttttattattggctgcagctcaagaaggaaattagtttcagactatagattaatgaggttgcttatgaataaagaacaccgagcggctttgctgcaaggattcatatgggacgttgatttaaggtggttccggatgttttgtctgatcttaggggctgccgaaacagtgattgtgatggccggtattgctattggatttggtgtgggtataacacgtgaataagaaactgtatcattcatcaaataggataaaaaataaaaaactgttctgtctcgttaaagtcatatatataaataggggattttcattaatttatatatatagatatacttgtgtacatgtacccgtaagtatcaaaagaaacgtgcataaggacatggcctaaattaatatttccgagatacttccttaagcggtaactttcttttcaatcaagtcgaatagagtaacaatatcggcagagaattttctgataccttcggacaatttttcagtggccatagcgtcttcattcaagtcgaatctgaatttagattcgtcgctgatgtaagaaatcttgtcgccggcttccttcttagcggagacagggtccaaaactcttgggaaaggttcagtactgttcatcaacttgtccaataaagctggagaaattgttagatagtcaacaccagccaagtttttgatttcgtcagtgcttctgaaagaagcacccataacaatagtcttgtaaccgtacttcttgtagtagttgtagattttcttgacggaaataacacctgggtcggcttcacccttgtaatctttaccagtgctggatttgtaccagtctagaattctaccaacaaatggggaaatcaaagtaacttgggcctcggcacaggcaactgcttgaacgaaggagaataatagagtcaaattacagtggataccgtccttttcttccaattctttggcagcttgaataccttcccaagtggaagcaattttaataaggactctttccttggagacaccttcttgttcaaacaatttaatgatatgtctagccttttcaatggtagcttgagtgtcaaaagacaatctagcatcaacttcggtggagactctgcctggaacaatctttaagatctccttaccgaattcgactaacaatctgtccacagcattttcgacttgttcttcggtggtcttaccatgcttcttaccgtattccacggcaacatcgatcaacttggcgtaagttggttgcttggcagcagccaagatcaatgatgggttagttgtggagtcttgaggttgaaacttggcaatagagccgaaatcaccagtgtcggcaacaacgacagtgccggaggctttcaattgttctagagagttgttagcaaccttttgtttcttttgagctggttcagacattatgtacacgtatatgtgacgagttcgagaagtattttactatcgtactaaattttacctgaaaaattatatactcgagaaagaggaagccaagaattgagaaaaaagaaaaacccgcgagtaaggaaattaaatacaggtgtacacatacacgcacacatatatatatatatatatatgtatatgtgtatataggaagcgcgcgcatgttagtatatacgattcgttggaaaggggccgtccaccaaacgtgacttgacgagttgacaaattgacctcaatatggctcagtcagtaatttttagttccgctttattcccgccatctttcaggccacgagggtagctcataacgccgcgctaatgccgctgcgtcacagcaaccagtagctcagccaaaaccgaaagagaaatcgtagctgtcccgatgaggacttatacacttgtcaccatctaaataaattatttattcgcgtttcggttcttgttttcgatttaattagattgttcattgaatcataataaatatgtaaaaaatatatatatttgaagctgcttcagaaaaacagggcttcctagtgtacagatgtatgtcggatgaaaaaaaaaaaatcttaaatgtgaaattgggtcaattcaattgactatgacttgatgttgcaaaaattccaagagaaaaagtttccagcacttgatattattttcctctttattggttttctggtctcaactttctgacttccttaccaaccttccagatttccatgtttctgatggtgtctaattccttttctagcttttctctgtagtcaggttgagagttgaattccaaagatctcttggtttcggtaccgttcttggtagattcgtacaagtcttggaaaacaggcttcaaagcattcttgaagattgggtaccagtccaaagcacctcttctggcggtggtggaacaagcatcgtacatgtaatccataccgtacttaccgatcaatgggtatagagattgggtagcttcttcgacggtttcgttgaaagcttcagatggggagtgaccgttttctctcaagacgtcgtattgagccaagaacataccgtggataccacccattaaacaacctctttcaccgtacaagtcagagttgacttctctttcgaaagtggtttggtaaacgtaaccggaaccaatggcaacggccaaagcttgggccttttcgtgagccttaccggtgacatcgttccagacggcgtaagaagagttaataccacgaccttccttgaacaaagatctgacagttctaccggaaccctttggagcaaccaagataacatctaagtcctttggtggttcaacgtgagtcaagtccttgaagactggggagaaaccgtgggagaagtacaaagtcttacccttggtcaacaatggcttgatagcaggccaggtttctgattgagcggcatcggacaacaagttcataacgtaactacctctcttgatagcatcttcaacagtgaacaagttcttgcctggaacccaaccgtcttcgatggcagccttccaagaagcaccatctttacggacaccaatgataacgttcaaaccgttgtctctcaagttcaaaccttgaccgtaaccttgggaaccgtaaccgatcaaagcaaaagtgtcgttcttgaagtagtccaacaacttttctcttggccagtcagctctttcgtagacggtttcaacagtaccaccgaagttgatttgcttcaaaccacgggtagtgatcattggcttaacgaaacgggcagctggtctgctgtaagcagcagcacgggtggccaaagcaaaggttctcttagcagtgatgacacgggagttgcagatcaatctggcggcttgagttctcaacatgttttattttttacttatattgctggtagggtaaaaaaatataactcctaggaataggttgtctatatgtttttgtcttgcttctataattgtaacaaacaaggaaagggaaaatactgggtgtaaaagccattgagtcaagttaggtcatcccttttatacaaaatttttcaattttttttccaagattcttgtacgattaattattttttttttgcgtcctacagcgtgatgaaaatttcgcctgctgcaagatgagcgggaacgggcgaaatgtgcacgcgcacaacttacgaaacgcggatgagtcactgacagccaccgcagaggttctgactcctactgagctctattggaggtggcagaaccggtaccggaggagaccgctataaccggtttgaatttattgtcacagtgtcacatcagcggcaactcagaagtttgacagcaagcaagttcatcattcgaactagccttattgttttagttcagtgacagcgaactgccgtactcgatgctttatttctcacggtagagcggaagaacagataggggcagcgtgagaagagttagaaagtaaatttttatcacgtctgaagtattcttattcataggaaattttgcaaggttttttagctcaataacgggctaagttatataaggtgttcacgcgattttcttgttatgtatacctcttctctgaggaatggtactactgtcctgatgtaggctccttaaattggtgggcaagaataacttatcgatattttgtatattggtcttggagttcaccacgtaatgcctgtttaagaccatcagttaactctagtattatttggtcttggctactggccgtttgctattattcaagtcttttgtgccttcccgtcgggtaagggagttatttagggatacagaatctaacgaaaactaaatctcaatgattaactccatttaatccttttttgaaaggcaaaagaggtcccttgttcacttacaacgttcttagccaaattcgcttatcacttactacttcacgatatacagaagtaaaaacatataaaaagatgtctgtttgtttagccatcacaaaaggtatcgcagtttcttctataggcctctactctggtcttttggcttccgcttcattgattacatctactactccactagaggttttaacaggatcccttactcccactttaaccactttgaaaaatgcggccaccgccttgggagcgtttgcgtcaactttcttttgtgtgagctttttcggcgctcctccctcattgagacacccctacttactctatggtatgcttgtagctccattatcttcatttgttctaggatgtgcctccaactatcagtctagaaagtacagtaaagtctctaaggaatcttctttatttcccgaagacagcaaactcgctgcttccgaactgagcgattctattattgatttaggtgaagacaaccatgcttcagaaaatacacctcgagacgggaagcctgcagcaaccacagtatcaaagccggcagaggcattgcacaccggtcccccaatccatactaaaaatctaattgcagcaactgctattgctattgttggctttgtacaagccgttattggcgtttatggggaaggacaatttatctagtgtttctcgttcacgtatttatctctacaagaatttgtagctgcctgaactcggctcctctctctctccaaaaataaagtgtgtagtaatttgcagtttttttatatattcctacgagttttcaaacgttcaaaagacagtatgttcaaaaattgtgcatacacacacgtatgcacatatatacataataatacactgtaataagcacatttgtaggtgctcttgcacttggtttattactgtcactgacttttctcacccggccgagagtcgtgcgaaaattcgcatgttaaagtgagaaaatagagaaaacaacacagctgaaaaaagtattggtaacagttcaatacgtgatcaaatatacagcacgtcgcgcagaaccagacgaagcggagaatattctacattgacagtgcatgatgcctgatgacaattcaaactcgtccactcaaaactcaagcgcattatacaaggacctgaggaaagaatatgaatctcttttcactttaaaggaagattctgggttagagatttcaccaatattcaatgtccttccacctaaaaaggattatcctgactactacgcagtgatcaagaaccctgtatctttcaatactttaaaaaagcgtattccacattatacagatgctcaacagtttatgaacgatgttgtccagattccatggaatgccaagacttacaatacaagagattcaggaatttataaatacgccttagtccttgagaaatatttaaaggacacaatctatccaaatttaaaagaaaaatatcctcaattagtgtatcctgatttgggtcctctacccgatgaaccaggttatgaagagtttcaacagaaattaagagaaaaagctgaggaagtagcgagagctaatgcagccagagccgagtcgagctcttcaatgaattcaacagaagcagccagaagattaagaaagactcgtacttccgtcaaaagagaatcagaaccaggaaccgatacaaataatgatgaggactatgaggcgacggatatggatatcgataaccctaaggatgctgattttcctgatttgataagaaagccactaataaatattaatccatatactcggaaaccattaagagacaacaggtccactactccatctcactcaggcacccctcagccgttaggcccaaggcatagacaggtatccagaactcaggtaaagcgtgggagacccccaatcatcgacttaccgtatattcaaagaatgaaaaatgttatgaaagtactaaaaaaagaggtgctagatagtggaattggtctaactgatctttttgaaagattgcccgatagacacagagatgcaaattactacatcatgattgctaatccaattagtcttcaagacataaataaaaaggtaaagactcgtcgttataaaacgttccaggagttccagaatgattttaatcttatgttaaccaactttagaatttcgcacagaggtgatcctgaaagcataaaaatttcaaatatcttagaaaagacctttactagtctggcaagattcgaactatccaaacctgatagaagtttcattccagaaggcgagctaagataccctctagatgaagtcattgtaaataatatatcataccacgtgggagattgggcacttcttcgaaatcaaaatgatcctcaaaaacctatagtgggccaaatattcaggctatggaagacaccagatgggaaacaatggttaaacgcttgttggtattacagacccgaacaaactgtgcatagagtggatagattgttttacaaaaacgaagttatgaaaacaggtcagtaccgtgatcatttagtgtcaaacttagttgggaaatgctatgtgattcactttactagatatcaacgtggtaatcccgatatgaaattggagggtcccttgttcgtttgcgaattccgttataatgaatccgataaaatttttaacaagattagaacctggaaggcttgcttaccagaggaaattcgtgatttggacgaagctaccattccggtaaatggtagaaagttcttcaaatatccttcccccataagacatctactaccagctaatgcaacgccgcatgatcgcgttcctgaaccaacgatgggatccccggacgcgccaccattggtcggtgccgtttatatgagacctaaaatgcagcgtgacgatttgggggaatatgcaacctctgatgactgtcccaggtatattatcagacccaacgattctcccgaagagggacaagtggatatagaaacaggtacgatcaccacaaacacgccaacagcaaatgctcttcctaaaacaggatactcaagtagtaaactatccagtttaagatataacaggtcatctatgtctttagaaaaccaaaatgctattggccagcaacaaataccactgtcaagagttggttcccctggcgcgggaggcccgcttactgtacaaggtttaaagcaacaccaattgcaaaggttacaacagcagcaacatcaataccaacaacagaaaagatcccaagcatcacgttataatatcccaacaataatcgatgatttaacatcgcaggcatcaagaggtaatttgggtaatataatgatcgatgcagcctcctcgtttgtcttacctatctctataaccaaaaacgtagatgttttgcagcgtactgatctgcacagccaaaccaagagatctggaagagaagagatgtttccatggaaaaaaacaaagggtgaaatattatggttcagaggacctagtgtgatagtaaatgaacgaataataaattcaggtgacccacacctaagcctgccactgaataggtggtttaccactaacaagaaaagaaaactagaatacgaagaagttgaagaaaccatggaagatgtgactggaaaggacaaagatgatgatggcttagaaccggatgttgaaaatgagaaagagtccttgccaggcccatttgtccttggattaagaccctcggctaagttcacggcgcacagactctctatgctgcggcctccttcgtcgtcttcatgatcacctttattgtaaaagcaatggcagcataatatcttcccattgcgcattaccctccgcgagcagagtcaaacttcaaacaaagcaggaaaatgaaataaaacagaagttattatatagaagaaagtcatctatagatatattatcgttgtattaatagtagccatataaaacaattatacttcatcaccaacctctcaaaatttcttccccaaggaccaaagcttttccagtaagttgctacaactaaagtgaaataaactatccgaattatataaaagatgcctgactatgacaattacactacgccattgtcttctagatatgcctccaaggaaatgtcagcaacgttttctttgagaaacagattttccacatggagaaaactatggttaaatttggctattgctgagaaggaattgggcttaactgttgttacagatgaagcaattgagcaaatgcgcaaacacgtcgaaatcactgatgatgaaatcgcaaaagcttctgctcaagaagccattgtaagacatgatgttatggcacatgttcatacatttggtgaaacttgtccggctgctgcgggtatcattcacttaggtgctacttcctgtttcgttacagacaatgctgatctaatctttattagggacgcctacgatattattattccaaaacttgttaacgtcatcaacagattggctaagtttgctatggaatacaaggatttgcctgtattgggttggactcactttcaaccagcacaattaacgaccttgggtaagagagctactttatggatacaagagctattgtgggatttgagaaactttgaaagagctagaaacgatatcggtctacgtggtgttaagggtactactggtactcaggcatcattcttggccttattccatggtaatcatgataaagttgaagcccttgacgaaagagtaactgaattattaggtttcgataaggtatatccagtcactggtcaaacctactcaagaaaaattgacattgacgtgttggctcctttgtcttcttttgctgctactgcacacaaaatggctactgacataagattattagccaacctgaaggaagttgaggaaccttttgagaaatcacaaatcggatcctctgctatggcttacaagagaaacccaatgcgttgtgagagagtgtgctccttggctagacacttaggttccttgtttagtgacgccgttcaaactgcatccgttcaatggttcgaaagaactctggatgattctgctattagaagaatttctttaccaagtgcatttttaaccgcagatattctattatctactttgttgaacatctcatccggtttagttgtgtatccaaaggttatcgaaaggagaattaagggtgaactaccttttatggctactgaaaatatcatcatggctatggtagaaaagaatgcctccagacaagaagtacatgagcgtattagagtgctctctcatcaagccgcagcagtagtcaaggaagaaggtggggaaaatgatttaattgaacgagtaaagagggatgaatttttcaagcctatctgggaagaattagattctttactggaaccatccacttttgttggtagagctccacaacaagttgagaaatttgttcaaaaagacgttaacaatgctttacaacctttccaaaagtacctaaacgatgaacaagtcaagttaaatgtttagaagcctttacatgtacaaataatatgtttattaccctattatatgttactaatgaaaaaaataacaattctttatttatgtacaatgcaagtagaattccctaaatagaagttaactatttttattttactgggatatatttttcatcttcttccttcatactcctttcatttttcttgtttttttggcttacggattttggcaatgtttatactttagaaaaaaaggaaactcataatgctggcatacttgaaaaaccatacggaaagatcgtagtttatttttgtaataagacactgaagtcagctgtttgaaagagtatattgaattgatggttttacctattagggatagtaatcataatttaaaaatatgaaacggttcttactcagtcgaagacagagacaccttcgtatgatttgctttcacaatataagtctctttagagctaatggtgactccaaattgatcaaggaatatggtgatggatttataccatgtttctttatcttggaatccataagaggggagctgctttatgtgagcgaggtacaatcaggttctttgcgtaaactctcttttcaggaattaccaaaactaactggtgcatctactatgattgtcctaaaattggtaggactagttccgagtgatattttgtgtaccataagttcagataaaaatggtatcattgacgataaatggtgcgttttatgtacctacacgatagatcttaacaagttacaacccataaatgaagacacagttctaattacaggcaccaacgcaccagtacttgatttaatagatggatcctacacattggctgcagaaaaaattaagccactaaagggccttgttagttctcacaaaaggaatataagtcaagtcaagatcaaattttcattggcatatagctctttactaaaattaaacaaactattggagtattcttcccaagtccatgaggaaatcaatgaaatttccagcaaaatagaagatgactttttgtcactcaagaatcaaaatcattggtatatgagaacagtacagaagtccatagaaacgctagaaaaggaagtcctacaaaggaaaaaaagcaagaaaaatatagaaatggcgcaactcgagagtaatgatactatcaaccattctaaaacagaactgtctctgatgtcgcaggacgagtctataaatgatgactatggaagcatatattctagatttgtgcaaataaaagataggttggaccaactgaggtttaagaaactgtatcagctgatagggatcttccattcaacggatttatttaattcagatagaggctatatttactttgaaaaaccttctagcgtaaatgatgttattaataggctcaagctaaaacctttgaatatagagatattacttagacaagccggcgaatccacaaagcacagagaatatgtaaacagccagttgggttattaccttttatttctccatttgacagccatccaaattttcaaggctcctttaccctatagactaatgtattatggtagtacatcagtgatcgacagtcaatatccgttgtatttcactgatcaaatgatttctaagcatcaagcaaagctgattaaagccatacattattttaatgctgatatattgcaatttaaacagattctggagaattaccgtccaacatagactgaaaatcaaaaatctcttttggactgccatttaatcttttccatgtgtgtatattgttctcatttacattaatttcataaatacggatacgtctttctgtacctccatagccagcataaccaccttctccacctccaccgccatagcatagccagattttgttcggcgtagagtcatctcgaagacagtaatcgttacaatggtcatgtccgcaactgacgacatccacacttaacctatccaaagttgttatcccctcagaattatacttaggtgcagtaacaccttctttgtacattccaatgaggggatttttctctccgggatgtgtcttggattcaatattcaagtattctggcagtgggatgtgaaaaaatgccattgaaagacctgttttgaacttcaagttcacatcatgataatcttcaatgtatttccactgtgattccttaatccaatcatatccaggataaattttaccaaccgtagaatatttatgtgagtccagaaaataaagtgtacctactgggacttctgtatcattgttcgaaaaaatctgataaatataattaccaacgccaaacgtattatcgtgtgtatcatggggactaaacttgaaaagggaatatggtagtactgaagctatttcggataactgccagcgcgttaagcttccctcgtcgtcgtgatttccccataccattgcccacggaatttttcttgcaatgacgggtgctaccgcctttaataatacggtttcagagtcttgaatagatctatcacccatgatttggtcaccagtaaaaacaaccaactgcggtttttcaatgtcaagaacttgttgaacgaaagtttccgtttttggatctgccttgcaagcttcatgctttggatactcatcgatacattcagactcccccacacccaagtggagatccgccaactgaacaattttgaactttccttcatcagtttcttgcagccgttgagctcctgtgtctacaggacgagtaccaacgaatttgtaagtcaaataagcaggttcgctgtagcggtattttactaagggaaattctttttgaagagtccaatttgctatcggctggatgcaatcaacaccaaagagaatgttaatatcgcttatgtagctccttttctgcaatagttctatgctaataggctcgaatgtgatggatacatccataaagggtagcgatttgtctttaggatatttggaaattccagttactgcctcaacatttagcttttctaggttggatccaaagtagtccaccaaagcagggtataacacatcatagtaaaggtattctgactttccaaaccacctgcgtccaaaggaacctctcaagtctttatgaattcttttcctttgtaagtattggtgcccatcagttaaagttgatttaagttcatgccgattaaaacatccttcataaaaacgaccaatatgaaaacattcgtcatagcctatatttacaactagcttatcgtcatttgagaatccctctagacctttattttggaaccatagattatcaacgtgtgatatcgggagtgcaaggtcgaaaccaatgtgctcttcaactcttggcgcctgtaggaagtaaaatagggcaatcactacaaaaactaccaagtataataggtacctttgatacagcctcggtaaccggatcatgttaagatttttaaccacggtgctggtcttcgatacttaagtataaaacttgtatcagaggtatctgcgatctaaaaagattaatttttgaaaaagatcaacactaaaccatttgaaattcaaaaagcacctaaggcaaaatataaatctaaatatacgtaaaatggaaacactttctgcgcagctttatacaagttagccttctagcttatgaaatagaaatgaaatataactgagcaagtcctatatacaatactattaatgatcttcttgtccatgagactgttcatggtgccttttagagacttcttcatcacttatctgaggcctgtggccacccgttctcaataaaccaccggcagtatcttcaactggaaatcttgcactgggtcttacgcaatggggcttgcgtaactgttcaaaatccatgattttagttttccctcccccttttaaagtaatctttggattctcgcccaacttttcctccacttcttttatattttgggtgcgttctttactattattattattattattattactaactgccattatagtttctttatgctgtcctcaccatgcctttcgttatcaggctagcattaaaagccttttaaggtgtaaagctttcgccgcgatggctttaaacagtagaaaatattcatatttacacacatgcataaagagagaccacttaataaagctagtatgataagatcaccggtagacgaaatatacatggaacagacacaaacagcagagggcactgacttactaattggtgacgaaaagaccaacgatttaccttttgtgcagttatttctggaggaaataggatgcactcaatacctggatagctttattcagtgcaaccttgtcacagaagaagaaattaagtatctcgacaaggatatcctcattgctttgggtgtaaacaaaataggagacagactcaaaattttaaggaagtcaaaatcgttccagagagataaacggattgaacaggtgaatagattgaaaaacctgatggaaaaagtaagctctctatccactgctacgctatcgatgaattcagaattgattcctgaaaagcactgtgttatatttatcttaaacgatggttccgctaagaaagttaatgtaaatggttgctttaatgcagattctattaagaaaaggctaatcagaagattgccacatgaattattagccacaaactccaatggagaagtaactaaaatggtccaagattatgatgtgtttgtcttagattataccaagaacgtactgcatttgctatatgacgtggaattagtcactatttgccacgcaaatgatcgtgttgagaaaaataggctaatttttgtttccaaagaccaaacaccaagtgataaagctatatccacatccaaaaaactatatctaagaacgttgagtgcattgagccaggttgggccatcctcgtcaaatttgttggcacagaacaaggggatttcgcataacaatgctgaagggaaactccggatcgacaacacagaaaaggacagaattagacagatttttaatcagaggcctcctagcgaatttatttctaccaatttggccggatattttcctcatacagacatgaagcggttgcaaaagacgatgagagagtcatttcgccattcagcaaggctaagcattgctcaaagaagacctttaagtgcagaatcaaataatatcggtgacatactattgaaacactcaaacgctgttgatatggccctattacaaggattagatcagacaagattaagcagtaaacttgacacaactaaaattccgaagcttgcccataaaaggccagaagataatgatgccatatctaaccagttagaactattaagtgtagagtctggtgaagaagaagatcacgatttctttggggaggacagtgacattgtttcattaccgacgaaaattgccacgcccaagaattggttaaaaggtgcttgcattggatcaggcagttttgggagtgtttacttgggcatgaatgctcacactggtgaactaatggcagtaaagcaagtggagataaaaaataataacattggtgttcccacagacaacaataaacaagccaattctgatgagaataatgagcaggaggaacaacaagagaaaatagaagatgttggggcggtaagtcatccaaaaaccaatcaaaatattcacagaaagatggttgatgctttacagcatgaaatgaatttattgaaggagttacatcatgagaacattgttacttattatggtgcttctcaagaaggcggaaatttaaatatttttcttgaatacgttcctgggggttcggtttcctccatgctgaataattacggtccatttgaggaatcactgattactaatttcactaggcaaatactgattggggttgcgtatttgcataagaagaacattattcacagagatatcaagggtgcaaatattttgattgatatcaaaggttgcgtaaaaattactgattttggtatttcaaaaaaattatcacctttgaataaaaaacaaaataagagagcttctttgcaaggttccgtattctggatgtcaccagaggtggtcaaacagaccgctactactgctaaagcggatatatggtctacaggatgtgttgtcattgaaatgtttaccggtaagcatcctttcccagatttttctcaaatgcaagcgatcttcaaaataggcacaaacacgacccccgagataccttcctgggctacgtcagaaggaaagaatttcttaagaaaggcatttgagttggattatcaatacaggcctagtgcccttgaattgctgcagcatccatggctggatgcacacataatttgaaaaagggctacttattaattctttttatggcactaaagtgctctggccgattttttatcaaataatacatatatatcatatttagtgacatttattgaatatatctgctatttaccggtttttttttttcaattacgctgattaagtaatcataaatcacaattgtgaaaaaaagaccaaactagatgacggtatttgattctcatacccctggaataaaatcaagtaagataattctgataaaaaaatccgaccgcacagatggaagcacgaagaaacaggcctttctttgcgaggtgatatcaaaccattgatatcttctcaataacctgctctaggaaaaggaggtagatagacaaaagcaaggaaataatccatagagtttcattcacatgaataatctgttaccaatttttctcataagataaagccatctatcaaaaatgatattgaaatatttgaaaaatgcttgtttttatggggaccacaattcgcctgtacctctagaagcgtaaactgttttattgaagttagtcctgataatttctctaccgttttcgctttcttccttagtgccattttttagcatcatattattgaatttttcactttctctaaatgatttatcattcatgtccttggacaagattgaatctacatcaacaattgaacaggaaggaatattgcattgcatggccatttcccggatttgaggatcttcactaattaaaaaccaatgtagcccctcatttccttctaggtagcatttgtaaatacaacttttcaacaaattctttaatctcttaggcaattttgcaatattaatctttccagaactatcattatgttccattacatctgaccataaaataatgtctaaaacttcgggaaattcgataaaaactttcaaattagcaaatttagaatcatctaatctatcgataaacttcaaggattctcgagctgcaaaacttttacgcctttgttgaaggaaatccaattcatttaatgtgaatgttggaatataaaagttcaaagtcacagcttctgtacagtccgagcaccacctcttgatgttgcctagacccttttcaaaagctgaagcatctataatgaaattatattgtgtcattaacctgctttttgaggagaccaaaattggaaagaaagaaggtgcttatatttcacgaatgaatgatattagcaggtgtaatattcttctataacaccactacactaacttttaaattaaagcgctcttcattgttacttcaaatcaatttctgagattatgaaagtcgtcacgttttacgaaggtattgaatttttcaggttcttttggaaaatagtagtatacatcagtttattaacgatgagatggtattattacttgcaccttttgtaaagataactagtattcataaagtccataagctacaatatgcctcaaaaaccacttaaagttactaagaaagccaaggacccccgtagggtcacaaagaaacaaaaaaatttgagaaaagctgccccattgcaattgaaatcaaaaaagaaatctttgcaacatctgaagaaattgaaaaagagctcttcccttaccgaaaccactgaaagattagttgcgagtaaagtcgggcatttggagttgttgagaggtactagaaaggagttggaaaaaggtaagaagaactctaaatgatttcaagtgaataagattcgcccatcattgaaaggtatttattttcgggtaaggactatctaggtacatctcatcaaattttttatagtccaatttgatcctagtgtttgtatattagctttgtaacttctaagttatccaatagaaaaaatgcgttgcttttttgtttcccgcgagaaatttaacaatatggtgaattaagtgttgatgccacagtttgtaaaaaaaatcgacacaggtttgctatttaagcagacgtaagtgttgtaaaattatgtattcccagtttggccagaagaggagtaaatatcgcatatttatagaataagtacaacatcaaataatgtctgcctttgttactaaagctgaagagatgatcaaatctcatccatatttccagttatccgccagctggtgccccgactgcgtctatgctaattccatttggaataagttgaatgtacaggacaaagttttcgtttttgatattggttcacttccaagaaacgaacaggaaaaatggagaattgcgttccaaaaagttgttggtagcagaaacttaccaacgatagttgtcaatggtaaattctggggtactgagagtcaattgcatagatttgaagcaaaaggcactcttgaggaggaattgactaaaatcgggcttctgccttgaacaggttggatatttttatattaatatgtacgtaatatgtctggaatatttcgaaaacacgggtaagcaaataaaggcctcccattcttccttctatagaagcgtgagcgcttcctcattaacctcttctttagcagtccatatgtaaagatatccaagagattgttcccataaaacgttgacgctaagcaccttcatcagtgtcatatagaaagacagcgctccaagcaccatttccgttttctttcattttggaatggttaaataatgactatctatgatagtttaaaaataccaatatcatagaagatgaaagtcaaatatatgactaaaaatttaggtgaaaaatgtaatttaatgtatacctttcatttacaaaatgtcaaagactttacacagtctccgcgtcaaattatcacatgaatgtacaatcacttttctgactgctctaagctatgtcattgcgatgcagaatttcactgccgcatagacaattttgtgtttcttttgacggtgaattcatactcatctgttccgtttatgcacatttacctcccacttcgctcttagcgattttatgtcacacaacaactttattcgtttatgccggactttcctacttatacataatggaaaacttaaaataattttaaaaggaaagtttctgccacatataactagttctcttttcttatatgcaattcggttgcatacttaaaagtaatcagaccgaatgaacatgtgcctttgcattacttcttttcaaaggacatctctttgcaagctaaccatctgaaaggccgatgaatggtcaaaggacgtcattcaaaacgcaaagggaatttccacattattttacgtaatgcttcgctgttacaaagacagaaacttgacaaatcaaggtcaactggatcgttgctcgaaagtcgccgtcagccatgcgttttactttcgtttgcaaaactctttctcttgtgtatcgtatttagcccgaaattagactataccaaaaaaaagaccaagattcttaagcttcatcaatcctttggaactgcaactattcttacaatctttcatttacatggctcaagaagtgttgctgctcaaaatttcattctatttcatgattatttacattaaacaagtatgatccgttattcttctcgcaaccggagtgctcgagaagtgccagtaagacgacaccctatttttcaagtccagcattggaagacttccaatgaacactcttatcattattctttatgcattacgtttcgcagtaatcctagaaccctaactttttctaaaattaccgtcaaaaatgacggacgcaacttttctcagaaattttttttttcatttctcttaaaaagttttctacgctggataaattgttctcttccctttgaaatatggagacgttcaaagtcaatttccacacatttaaggtgaacaaataaattataagataccacattaacaacaagtatgtggacgaggtgtggtaagatctccgctgaggttgattgaaaagtattgggtaaatttgtactttttgtctgctgctggtcgtttgtctttcgttttaaaattgcgctagacaagtaaacagggattgcttaagaatcaaagtagcttaactctaaagtattattttcctcagttgtgggcccatgtgttggagggaaggaatatattgaaatgtaaatgttcttaagttcggttgaacttggatattgttacaagagttctagtctttgataccatttttacgcaattacaaccgcattatttaccttttcatcttcagttttacggttcagtttattctgttacgaaagaactatggtgattcaaaggcgaagtgcgtaggattgtaactcctatatctttaggatacttacaattttgtactgttttcaagaccactgtaaccgataataaaccggaggacacattttaacccactatttttttcagaagatcagatgcgagagctcgaagcataagtataatactaacgtttcaaaacatagtaattaggtaaaaaatgactcgctcttccgttttagctgatgctttgaatgccattaataacgccgaaaagaccggtaaacgtcaggttctattgagaccttcttccaaggttatcatcaagtttttacaagttatgcaaaagcatggtatgttccaactatttttcaatattttcacatgtgtttcaatttctgcttatttttaaatgttaccacgaggtttgtccaagttcaatgttgcgcaactctaacgaagaaataattattgccattgttttttactccgggctgataactagatggtgtgatcgggcagtatactaatttatactggacaaagactcgtaaaagatgttctttgtgcttagtcccatactgttttttaagtgtccgggatatttaatcccatgtggaaatgcttcttacacggttatggattacacctcatgtgtagctactatatccattaccgtttacttttcctcaaaatctcactcttaaaattttcaatggcaaaattcttccgcacaacttagacaacattttcttgttttttatgaagtaagcaaaaatttcgaatcaacaacgctccatgagattcttcaatactaacatttactccttatttaggttacattggcgaattcgaatacattgacgaccacagatctggtaagattgtcgtccaactgaacggtagattgaacaaatgtggtgttatttccccaagatttaacgttaagattggtgacattgaaaaatggaccgccaacttattgccagccagacaattcggttacgttattttgactacttctgcgggtattatggaccatgaggaagctagaagaaagcacgtttccggtaaaatcttgggttttgtctattaagtaagtttttagtagtggtacatatataatattaattcttatatccgtcttttctctttggttattttctcagcttcagatattcaaggaaccgtatttttgcgtaatagcgaaaaattgtttatgttacataataagtgaaagctggaggagcatatgtatagaatcgaagagaaacctgaacaatttttcggtattagttactaaaaggctcacatatacatgacaaagaggagaaacctctttatggttggttcttccttcacaatagatcatttacctccagaaatatggctttgtatttctaagctggtcgggacgtctgacctgcataacttgtgtttaattaacagaagattgtatttgacaattacaagtgatgaaatttggaaaagaagatgctatgaccgatggataaatcgagaaagcttagatattttaactggtaatgattacgattctatacccgtctctcaatggtattcttactatttaagaagagcaaaatgggagaataaaattttttgtctattatgggggttaactgaagaaacaaatccccaacatttcagagagaaatatttgcatatcctccaatttagacattacaaactggctacatttctgcataggattataaaacaaggctacatacctgataaaagaccacttgatttaatcacgtatgcaaactatctgttgaaaaatgtgcgacataagtacgtatttcctttattttatcccacaaatgccgctgaattgaaaaatcttaataatatggcctcaagggatgctgaaatgatatatttaagattatctgccattgatacgtcttttgatgacttactagatgctagagaattcatattaaatggaatatgttccgatctactacaaaagtataaaaaaattgaagagtttttgaaattacgaccggtgactagggtttccaagttaatctcaatcagtactgactatctggactgcttcacacaacctcatgattcagtgggtcaaacaaatgatagggccacaggaagggagctacatagagaggatttcatgttactaagagtatattcccgagaaggacgaggttataaaactatcattctagcaataatacaggctatcactaagagatataacgttgattcatatcttgctcgagatcatttggtggtgtctgaaccagactttccagatggacgggcatttgttaccgtgaatgaggatttccagccatacatttttgataaagaggaccttttgagcgtttggtcgaacaacttccataacgcagaaaattttgaaagtacagttttaccagcattattagaaccaatatcgatacaacatcttctgacggagttctttcgagaactgctgcgatgcaagcccaggccatttgagggatatccaaacagagcacacggattacgcgatatgtttccatacggaaaagtggaagttcccagagatgtgacgatgtattttgcatttatatacgatcttttcgatggcatgtttgaatctggaatgacaagtttacggggccagatgttgagagatttactgaactacgttaacgctaataattttggtgatttgaatatcatcattggacaaaatgctcttaaggaaccaaatgactgctggtccaacaagagggattacgttcttcttgatgacaataataagattggatatttctatacggatattgaaactgaggatactttatgtgccttaaaccaatatgaagtggacggcaaagtttttataacaacaatagatatcttgggtgatataagagtacgcctggctgaaggactaacgccttttcagggagataatgataagttgtgggagagcttttcttccgttgttccacgaactgactggggactttttttcaaaggctatgacaaagaaaggcgtagaatgcaattaaacccttacatagaggaaaagctttccaatctagcgaatgatgaacagcctttacataatttatagtcatatttaaggaggtttccaaaagtagcatcctgacacattctattacacctttttttatcagcccgagcggcctttccttaacggtgtatacattttctaacagtattaagtcaaaaacagcagcatcaaaagtacgactacttttacaagatttctttagatatttacttcacatagaagaagaaaatcaacggaataaaaatccaaaaatcatgcttaaatctggtagactcaactttctcaagttgaatatcaattcacgattactatactcaacgaaccctcaactgactaagaaggtcattggtatcgacctgggtaccacgaatagtgctgttgcatatatccgtgattctaacgacaaaaaatcagctacaatcatagaaaatgatgaaggacaacgaaccacaccatctatagttgcctttgatgtcaaaagctcgccacagaataaagatcaaatgaaaactcttgtagggatggcagctaaaaggcaaaatgctattaattctgaaaacactttctttgctacaaagagacttattggccgtgcattcaacgacaaggaagttcagcgagatatggctgttatgccatataagattgtcaaatgtgagtcaaatgggcaagcctatctcagcacgtctaatggtctcattcaatcaccaagccagatagcatctatattactgaaatacctgaaacaaacttcagaagaatacttaggcgaaaaggttaatttggcagttattacagttccagcatattttaatgattctcaaaggcaagccacaaaagatgccggcaagttagctggcctaaatgttttgagagttattaacgaaccaactgcggccgccttaagctttggaattgatgataagaggaataatggattaattgcagtttacgatttgggtggtggtacatttgacatatccatcttggacattgaagatggcgtgtttgaggttcgtgctactaatggtgacacgcatttaggtggagaagattttgacaacgtcattgtaaactatattatagataccttcattcatgaaaaccctgaaattacacgggaagaaattacgaagaacagggagacaatgcaaaggttaaaagatgtttctgaaagagctaagatagatttatcccatgtgaagaaaacttttatcgaacttccatttgtatacaaaagcaaacatctacgagtgccaatgacagaggaagagctggataatatgactttgtcattaatcaacaggactatcccacctgtgaagcaagcattgaaagatgccgatatcgaaccggaggatatagatgaagtaatccttgttggtggtatgacccgtatgccaaagattagatctgttgtaaaagatctttttggtaagtctccaaattctagtgttaacccagatgaaacagttgctttaggagcagctattcaaggtggtattctatccggtgaaataaagaatgtcttacttttggatgtgacaccattgacattagggattgaaacatttggaggagcgttctcacccttgatacctagaaatacgacagttccagtaaaaaaaacagagatatttagtactggtgttgatgggcaagcgggtgttgatatcaaagtttttcagggtgaaagagggttagtgcgtaacaacaagttgattggtgatttgaaacttacaggaatcacccctttgcctaaaggcattccccaaatatatgttacttttgatatcgatgcggatggtatcatcaacgtatctgccgctgagaaaagtagtgggaaacaacaatccattactgtaataccaaattctgggttaagcgaagaggaaattgcaaaacttattgaagaagcaaatgcaaatagggcacaagataacttgatcaggcaaaggttagagcttatctctaaggctgacattatgataagtgatactgagaatttatttaaaagatatgaaaaactgatttctagcgaaaaagagtattctaatatcgtagaggacatcaaagctctgagacaagctataaagaattttaaggctaacgaaaatgacatgtcaattgatgtaaacggaataaaaaaagctacggatgcgctacagggtagggcattaaaattattccaaagcgcaacaaaaaaccagcagaatcaaggtaaataagtgaacaaaacacaaataagacttgtatattaacgtgtatatcgttcattaaagcatattttgacgtatttatactttatacatttatatatttctttcccgtttcaaattttcggttcaaataaagttgcatgtggattattatgttcccataaattctagtttttattattttccttgcaccgtatacctttatagagatttgttcatgaatcttcttcttgtgaacgccaaccaaaactttgagggatattccttagaatctgtagagctatagactctttctaatagtctcattgccaattcttgacggaattgctgaatataagtcttcaacaagtccatcgaattatgatcttgtactggaacttggtaaacattattcagagggaaacccggtgtacctggtaaagtaaagttgtccaaggccacattggttaacactttgacggcttcgttaaatgacgttgttattttcaaatgggctaggcaatcattgataaagagaattccgtagatgagcactctgtcggcgggtgatttaatttcaaaattcttgaagaaggaattggcacgaaataggtccaagcactcgtcgataatatcgtaatcggaattgctggggtatgcaggacccctgaacttagtgttcaagggcagaagcgcaaagttccctaccatgcggtcagtgttaggatctacagggaaagtcgagtgatacgcaggcatttattaatatactgggagtggagagactgataataccaataatcttcctttattgatgtttgttactgcgcaccaagtgtttaatttattgttattcattgttatactaaaccaaaccgcaacggaaaggataggggttcgtggtggatgatccgcgtaacggccgagtctgtgaaactgagagagaatgatagtgaaaacaatggtatggaagtccgaggtcctaaggcttgaagaaagtttttaaagggcattatgaccagtgagtactgacgacctaatttaataacagtattgagccgattaggttttcctggattttttttttgctgttttatagctatttttttatttgttgtttgtggtcattaatatattcattcgctctgttagtgtaatcgattacagtgctctattactgctgacttaattggacaattcatctcttttcctgcggttatgagcgaaaccaacgttgacagcttaggggacagaaatgacatatactcccaaatatttggtgtagaaaggaggccagattccttcgctacttttgatagtgactcgcacggagacataagttctcagctgctgcctaatagaatcgaaaatatccagaatctaaatgttctgctttctgaagacattgctaatgacatcattattgccaagcagaggagacgttctggagttgaagccgccatcgatgattctgatataccaaataacgaaatgaaggggaaaagctcaaattacattttatcgcagcagactaatattaaggaagttccagatacacaaagtttgtctagtgctgataatacacctgtgagcagtccaaagaaggcaagagatgccacatcttcccatcccattgttcatgctaaatcgatgtcccatatatattcaacgagtaatagtgctagtagacaagccaagcactataatgaccaccctttgcctccaatgtctccaagaaatgaagtttaccagaagaataaaagtactacagcttttgtgcctaagaggaaaccttcgctcccgcaactagcacttgctggtcttaagaagcagagcagtttttccaccggcagtgcatcaaccactcctacacaggctagaaaatcgcctttgcaagggtttggtttcttttcgagaccaagttccaaagacttgcacgaacagcaccaacatcaccagcatattcagcataataatattaacaatcataataataataatactaataataatggcgcacattatcaagtgggtagtagtaacagtaattaccctcaacattcacattctatatcatctagatcgatgtcgttgaactcatctactctaaaaaatattgcatcatcttttcaatcgaagacttctaacagcaggaaagctacgcaaaaatatgatataacttccaacccattctcagatcctcatcatcatcatcatcatcatcactcttcaaacagtcacagtagcctaaataatgtccacgggtctggaaactcctcaagtgttatgggaagctcgtctaatattgggttgggtcttaaaacgagagtttcttccacctcattagctttaaaaagatacacttcggtttcaggaacttctctatcttctccacgtagaagtagtatgacacctttgtcggcatctagacctgttatgagcgcttcatcaaaaaaacctcaggtatatccagctttgttgtcaagagtcgccacaaaatttaaaagttcgatacaactcggggaacataagaaggatggattagtttaccgtgacgcatttacagggcagcaggcagtcgatgtcatctgtgctatcattagaacttctgatagaaacttagccttgttatttggtagatcactagatgcacaaaagctgttccatgatgtggtatacgagcacaggttaagagattcaccacatgaagtttacgaatttacagataactcaagatttacaggaacaggttccacaaacgcccatgatccactgatgctactcccaaactcatcatcttttaattccgggaaccactcttatccgaattccggaatggttccatcaagttcaacttcatctttgaatagtgatcaggcaactttgacagggtcgaggctacatatgagtagttcattgtcccagcaaaagaaccctgcagccattcataacgtcaatggtgtgtttacattactggcggaatgctattcccctacgtgcacaagagacgctttgtgttactctatttcgtgtccaagacgtcttgagcaacaagcaaggttaaatctgaaaccaaatggcggcctgaaacgtaatatatcaatggcattggatgatgatgacgaagaaaagccatcttggacaagttccgtatctaaagaggattgggaaaacttaccaaaaaaggaaataaaaagacaagaggctatttatgaagtttatatcacggagaagaactttgtaaaatcattagaaattacaagagacacattcatgaagactttggctgaaacaaatattatttcagcagatattagaaaaaatttcatcaagcatgtttttgcacatataaacgatatctattcagtgaatagacgttttttgaaggctttaactgataggcaaagaagttcaccagttgtgagaggaattggggacattgttttaagattcattccattttttgaaccatttgtttcatatgtcgcttcaagaccatatgcgaagtacttgattgaaacccaaagatcagtcaatccctattttgctagatttgatgacgatatgatgagctcctccttacgtcatggtattgattcgtttttatctcaaggtgtttcaagaccaggtcgatatatgctattggtcaaagaaatcatgaaatctactgaccccgagaaggacaaaagtgattatgaagatttaagcaaagccatggatgcattaagggattttatgaaaaggattgatcaagcaagtggtgctgcacaagatagacatgatgtaaaattgttgaaacaaaagattcttttcaaaaacgaatacgttaatttaggattaaatgacgaaaggagaaaaattaaacatgaaggtatactatcacggaaggagttgtcaaaatcggacggaacagttgttggtgacatacaattttatcttctagataatatgctcttatttttaaaggccaaagcagttaataaatggcaccagcataaggtattccaaaggcccattccattgccattgttatttgcatgtccaggtgaagatatgcctgcgttgaggaaatatattggagaccacccagattgttcaggaactgtaattcaaccagaatacaacacgagtaatcctaaaaacgcaataactttcttatactacggtgccaagcagagatatcaagttacattatatgctgcgcaatacgctggattgcaaacgcttttggaaaaaataaagcaaggacaagcagctattataagcaaaacggagatgttcaatgtaacgaaaatgagcgataggttcttcgattacaccaacaaaattaacagtgttacttcctgtgatgggggtagaaaacttctgattgcaacgaactctggattgtatatgagcaacattaaaagacagcagaataaagatcatagacataaaagctctgcttttttttcaactccaatccaactagtacaaagaaataatatcactcaaattgctgtattagaagaattcaaatcaatcatacttttaattgataaaaaattatacagttgtccgctgtcattaatcgaagcagaaggtaatgggacatctttcttcaaaaagcatcacaaggaactgatcaatcatgtgagtttcttcgcagaaggagattgcaatggtaagagattaatcgtgactgcacacagttcatcgcattcaattaagtacttcgagcatgaacatccattattggccgaaaaaaatggtagtggtagcggtaacaaaaaaagtctcaagaaaaaaatcaccgaggttatttttgattctgaacctgtctctatttcatttctcaaggccaacctatgcattggctgtaaaaagggttttcagatcgttagcatttcacagaatgctcatgaatccttgttagatccggccgatacatcattagagtttgcactaagggatactttgaaaccaatggcaatctatcgtgtgggaaatatgtttttgctgtgttacacagaatttgccttctttgtcaataatcagggttggagaaagaaagaatcgcatattattcattgggagggagagccccaaaaatttgcaatttggtacccgtacatcttggcattcgacagcaacttcattgagatcagaaagattgaaactggcgaattaattcgttgcgtccttgctgataagattcgacttctacaaacaagtactcaagaaatcctgtactgctacgaggattatcgcgggtatgatacagttgcgtcgttagatttctggggttaagatagcaacgtatatagactttccttattttctttagaataaaaagcataactaaagttgtaaaaggagcagaattatgaataataaacattgatgacaatagtggaaaacgacataaataataattttataatataataatgataattcaccgtcagagggatttgtatgcaaatgattgatgacgcgagaaaaaaaaacgcgaaatttttcttcccaaagcttcgaagtttttattccgtccacaaagtgaaaaattttcagaaaattttccagactgtgaataaacaaaaggttggcttacgcatttggcttgtcttttttttttttcacaggttcttagtaaataattgtataaaatatttatctggagtcttctgtttgttgtttagccttgtttgaagttttatttaacttattaccccagttaggtactgtgtattttccgcatatctggtgtctttttatttggtcattgattggtttttgacagctcttcactcgcttcaagcttacttctagtttatttattcggcttttttccgtttgtttacgaaacataaacagtcatgaacactaccacatctactgttatagcagcagttgccgaccagttccagtctttgaactcttcttcttcatgtttcttgaaggttcatgttccttccattgagaacccattcggtattgaattatggccaattttctccaaagtgtttgaatactttagtggctatccagctgagcaattcgagtttattcacaataagactttcttggctaacgggtatcatgctgttagtattattatcgtttattacattattatctttggtggccaagctatcttacgcgccttgaacgcctctccattaaagtttaaattgcttttcgagatacacaacttgtttttgacttctatttctctagttttatggttgctgatgttagaacagttggttcctatggtttatcacaacggtctattctggtctatctgctctaaggaagccttcgcaccaaaattagttactctttactatttgaactatttgaccaaattcgtagaattgattgacactgtgtttttagttttgagaagaaagaagttattgtttttgcacacttaccatcacggtgccaccgctttgttgtgctacactcaattaattggtcgtacttctgttgaatgggtagttatcctactaaacttgggtgttcacgttatcatgtactggtactacttcttgagttcatgtggtattagagtttggtggaagcaatgggtcactagattccaaattattcaatttttgattgacttggtatttgtttactttgctacctatacattctatgctcacaaatacttggacggtattttaccaaacaagggtacttgttatggtactcaggctgctgctgcttatgggtatttgattctaacatcttatttgcttttgtttatttccttctacatccaatcttacaagaaaggtggtaaaaagacagtcaagaaggaatctgaagtttccggctccgttgcatccggttcttctactggtgtcaagacctctaacaccaaggtctcttccaggaaagcttaaataggaagcgagaatttttgacagcgaatgaaaaagaaaaaaattaaatgttaacattttctttatattaaatatgtacgataaatgaaatcattattatagaaatgatagattattggcttggtgtttttcccattttgattaatcatttccttagctgcccaaagaattgcacgcttacagtgaggagtagtgatacattacaattataaaataaaattatatagcagctaaaatttaaaacaaacagactttgttcctttgtatgtcctatggaagatactgacttgcagtttgtaaagtgtccaagtcgtaatccactttacttgccacgaattgatcattgaataatttaattttaataatctcttgagttaaatcgggatgtactctgggaatgaagtcatttaaaaatgagtactctcccctaatggaggaagatgactgacattgcattatcttgaacaaaattctaattatcggcccagcatcattatctaagtattgggaccagaacgcgttacacacaggaacatggatatcaagtaactcttcaatgaagttcattggttgttctagctctccaataatagagtcctctgttattattctcttcttgaaacggccactatctctaatgaaattgctttgttcacaatacgacctgtaagatatgggtacgatggagtttactgtactcaagtaatcatataagtcctcttgaatgatttgtaaaaagatactatctatttcctttgatatggtagagtccgataaatgatgggtatcgctaagagaaccaaatgataggttattattgctattctgtggttgttgttccggtaatacagaattttctccaccagtaggatctatatctattcttgatgcgggcgtatttgaattcgagtggttgtcgttgtcgttatcatgttcgttatcattattgtcgctgttgttgccgcttctattgttgatgttgttcgtctgattatcagtgtgaatgttcatgttgctatgattggaagtattatgactgttgttaacgttgcctattgtgtgtaaattcaaaaaccttttcaataaactgaaaattgatgtagaaagtttgtcgactatttcagaaagtgaaatggtatgaaaagaatattccaggacttctctttcgaataaaatcgcaggacacaagaacattgctaaaaggttcatatcgtctgaaaataaaatggttttgaattcttgaattttagacaaaaatgtttcaaatggtgcaattaaccgttgaaattgtaggctgcccaaggtggacaacagatgcttttcaatagacattatggcgaacaaaacataggtaaagtttaagcttttggaagaagtaaagaactttagtattctattgatggaattcaaagtaattaataaatagtctattatttgaaagtcgatttcgttgaatttttcaatttggatagaagattgatattcttctattatgggacgaaggttcaaaaaagtttgcagtgaaacggtggcggtagagtaacgggataaatcgaatttcgaacaaacgaattcgaagccaaatttttcacacaatgaacggaatttatctaactgccacgaattagattgtaaatcatccaaaaaagaattgattctggaaaaaatggaattcgaaatatctatatttgacaaatcaattagagagtccaataaagtcaaaggttctttggagaatgatgattgtctcggatgcgtaatatcggcggatttaggcgtaccgaacaatggcaatatcgcagaatttattatggaaataatgcaattgtgataatagtttttagcattcgtatacgtattcgggaaaaagggttggctatccattacgtttagtagatctactatttgagatcttggtagagtgatagaaatcacagtattttgtaaaccaggtaattcttgtgagattttgagcagttgagctggaatagatagtttggggtcattgttatattcatgtaagttttggatgataaggggtaaagtctttacttgggaatgaaaatcatcatagtactgaatactcaatatagatatcgtgttattccaaacggagtggcttagagagaaaaaattgattttttgcatttcaaataattggttcttcaacctgtttgataactgattagatctatcggttgggtccattagtaagtagtttttgtcgataatcaacgacaaatcggaattgtttcgcaaagctgtcctttgaatgattctatcgagattatatgcgatggacctgatagcattcagaattaagtcatggtcaatgaagcttagtgagttggcgttctgattgatcaaaaggcgtacggcagtgttgtctacgaacgacagaggcaagttttctgatgcaattatgatcgcaagcgactgcacaagaggcaaggccatttctttttccctagttctcttcaaaaagtcctcgtctatttccagcaggttagcaatgctgttcgttgtggcgctaccgccttgatggttcttcaaaggtggtctgaccataaaagtagaacctgcttctacgcccgtccatccgctatagtaattggcattcgggtctatcttatgcgtgctccacaaatgagtttgcgaggcttccgccatgcttatgctgtttccttgccgtcttattatcacaccgcagtacttgcattttactgcctccagcatcttgtctacacccagaaaatggcccaagtagcgtgacctgtctctggtaagcatatatgcgggcacccattcgctaccatcctctgctaacgactccctttcctcatctctatctccatctgtatctgtatccgtatttgtggccgtcgtagccgccgtcgccgacgatacagttgaattcatgggaggcaacaccaatcctctttcagcactctgtacctgtgtgtccatcgctctcatatgtgctctcgtgcttgtttatcctgtggatgctgccagcaaactctctctttcccatctcttgatggttcatgttatgtgttgtttattgtttgctgatcccattcgcgctttcccggccgtggtaaatgactacacggtgaataattgcgccattttttcgccgttgcggtgttttttttgtagccgttggaagcatggcagtaccatctggaacaaagcaacggtataaagaagacagactgttggtaagcgctgcatgttggtgacaaaaagttggtttcgagaaatcagggtgggtgttttttgtgtggcatgtgcagcgagcgatgagtaatgcaaacaatagtgctatgaaccacatcacgttgcctcccatctcgtcatttgacaaccttatcaaggcagccgagagacaatataatggcgaggcttcgtccgcctcgacacatccgacactgcctaatatgaacattagtaacggcagtggcagtgcgggcgcatcatcgtcgatgctgagctatcagttgcttccgcactccaatgatgtgtcccggtcgaactccagctcgagcttccttccctccgtgcagcagcctacggaaggttccgcttctgcatcggaaacttcttcatctgcatcaccttcacgttccatttcaccaattttaaaagtggctggtccttcatctgttggcggtgccggggtgagtaccccccatagcaccaaaatcaataagccaaggaaaaagaagcaatgtccaatttgtcgtaatttttatgccaatctgaccacgcacaaggcaacgcacttgacgccagaggatcggcctcacaagtgtcccatctgccaccgcgggttcgccaggaacaatgacttattgaggcataagaaaagacattggaaggatgagatactgtcccaatcgggagtactttcgaaccataatgatggtaagggaggatccgtttctcccaatgatgatgatacccatgaaaaaatgacaccgatgaattctgtcacagattatgcacaattgaaatcgttgcatcaaatcaagggcacattcaagtgcccattcaactccaccttaatacaattggacatggatatgtacccgtataaactgaaacctttaaattttgagacttccaattgtcaccagacgggggtgttctcacgttgcgacaccttcaaaaaccatttaaaggctttgcattttgaatacccgccaggcacgaagaaaaaggatagaaatgttgttcctggtagatgtaagcattgcggcctgaagttcgagaacgttgacgtttggctcaacgaacacgtaggtaaacaatgcggctataaataccattgattcccggcagcataacgacttttcccctgtttttattagtactagtagatatttaatttatgtatctgagtttttaatgttttttttccttctcttatcattcttcaagtgcggctatccttctgtactgtggcctgccgtcaacaacttctctgtagattatcagatccattcccttcatgtatgaatcaggtagttttgtggggtacagtgtaacgccgcttttcctcttgattgaccacttatcaactaaggtgttttcgataccattatagaagtctgtgggaaaacttttggtgatgatccagcagcccaaaaattctcttagtttccttagaatcttaaacagtttttcaaatttcgataaatttattacatcatagtttttgtcgctttcaaaattcaagaaagacaaattgtcgattactattcctcgtaattgaaagttgaaattatcaacctggcacctccttaacgcatccatgggagagtcatacagtaactctagaaatacgattaatcccgtgatgtttatgcaagatagcgaattcatgtagatcgcgccatgctgtctttgcttttgttgggaccatattgatactatatctatgattaggatcttttcgtcccccgtagtacaattcaccaacttttgcagcgctaccgaaggtttaaaatcactttcaatgatgtgcaagaaccctagtttactctcctgctcttcactaattaggtttcttaattcatttggtaggtttatatagttcttggttgatgtgatgaagtttgacaaaggataaattctaatgttctttaaaacttccatcccattccattcgctacttcctttctcttttcctaagaattttcattattagaaggagtaatgcttacggtacacatacatacacatatatatatataaatatatatatatataaggacatatacagatttttttttttcgcgtactaaagtacagaacaaagaaaataagaaaagaaggcgatcattgaactactgtgacttgccaatatggtctaaaaatttgtcaatttcacctgaagaacccaaccaaatagaagatttgtcatggatatgacttggcaccaaatccaagattctctctccgcgatcgttgaccgcttttccccctgcttgttccattaagaaagccattgggaaggcctcataaagcaacctcagttttccgttggggctcttcttgtcgcaagggtatgcgaaaaggccaccgtaaagaaacgtcctgtgaacatcagcaaccatggatccaacatacctagccgagaaaggcttgttgttgttgtctgcttggggttgtttgactttctcaataaatgttcttatagtctcgttccagtagagggtgttaccttcattaattgagtagatggccttttgaggcggaattcttaagttaggatgagtcaagatgaattcgcccaagtttgtgtctaaggtaaacccatcaactccatcacccaatgtcaatactagatgcgtagaggatccgtacatggcatagcaagcggctaccatttctttaccacatctcagtacgtcgtttatagtacctgatgagtctggtagcagtctgaatatagacgcgatagttccaacggagacaccggcgtccaaatttgaggagccatcaataggatcacaacacactgcgtatgagcccgtgtttgtgggaaaaacgatcaagtcttcctgttcttcagatacaaggaccttgatgatcccactagccctcatggcattgataaatatttcatcacctagaacgtccaacttcttttgctggtcaccagtgaagttggaagcgcctgctaacccaaccaagttaaccaattcagcacgtctgatggtgtgagatacaaatttgaacgcgaattgcaaggcattcagtactaatgtgaaatcaccagtagcgttcttaaattgcttctggtgctcgattatgaatctaggaagagtgatgatatcggtatcaaacccttcggtagagtctcttcttggtccatttactagagttggcatatgtgtggtagtatgagggatgtttcttatatgttcgcactgttattcttaggcctatcatacaaaaagcaagatcaagacaaaatacacgtctgtaattgcactacttgttgctccatatatatacgtacatttgttagcgagtgaaatggataatattgcctatacataggacgatccttataatatagtgtggggaagatgccacaagttggcaagcgacaggaagaaaccaagcaaaccaaaaaaaaagtagtgggtattggccagttcggcaatcttcgccttcaaattccctgtctcaactttttaagctttcttgatatgtgggaataccaggctattgctgccttgcgttggctcttacgcccttaacattacctagctttactacataatgagctttcgggcccgcataactccgggtgtccgcacgaccgcgactactaagaataataataataccccggaggtgaattcaaaagcggcgattccatccgtccggaaaagagagcagaagttagcccgggaccatgcagtttgatgggttgtctatcttagactggaaaattcgaagaactcatccttgttagctcagttggtagagcgttcggcttttaagcgcatttgcttaagcaaggataccgaaatgtcaggggttcgagccccctatgaggagttctttactttttttttatcaacttcctttgcttcacgcctattataaatttagatcgcgtatgatattgttaatcggcggttagaatttataaaaatcgacgattttctaggaattatttgcgcatacatatatatagttatttagctctatacaggtgtaagaaggcgttgataaaactatggtaacaaaataaaaaaatagagggaggggtgtggctaaatgcgattttttttttctttggatattattttcattttatattcacatcaaatcagaaaatcctggaacgaggttcttagtaaacccaccttccttggcggcagcttcgtagtagccgtagatggtggtagtagccatcaaaatggatgccccagaacctaaagtacctagtaggtcggagccaacagaaagagcaccgatggtagcaccgccgaaagcagcagcagttggaatgatcttcttcaattctctgtaaatggaggtttctctcttaccgttaatgaccatgccttgatctttgaattgtttggcaatgtcacgtggggaagtgccggagatttcgatccatgtcttggaaaatactgcgcatgaaccaagaacaaatgtgatgtagacgatggtcttgatagggtccagaagagcttcggataaagacattaatggttggatgtagtaggccaacccgctcaaggccatttgagggccctgggtgcccggcctgataccccaaacaccgatcaaacgaatcaatggattggttgggtatttctggaaaaggatttgagagatcaagaaaatgttagaagtcaatgcactctgcaacatgattggggtgttggaagtataaaagagtttgatggggtagataccaatttgacctctcactttggttgacctgatgggcaattcgtaacggaagccttgtaaatataaaacaaagaggaagatggccacggtcatcaacacttggaacatattaggtagattggtacggtaaaaggcctcgacaagggctcttttcttgtcctttctgacagccaaaagatggaaaaaggcaatcacagcaccttcgaactccttaccacgaccggaattgactgtagtaggagcaaacgctctccagaaaatttgttcggcaatattggttgccgtgaacagagaaataccggaacccaagccgtaacccttagatagcaattcgtctaataacatcacaatcagcgatgcaaacatcaattgaaagattaacaacaaacagatgggcaatccgaggtccgaaggggcaccgtagttacctgtcatgacgaccacaagggcttggcccaagatcagaataatagcgcacaccttttgagcaatttggaacagctctctgtcctgcttgctctcaggtctgatttgtaaaagctgagtaccctgcaaaaattggaaaatcatagatgaagtgatgatgggcgaaacacccaattccagtaaagtaccacggttggaggccagcatggcacgtagccagtacagagggtcggaagtctcactggacacgatcccgtacagcggaatctggcccagaatcaaaaagatcagtagagaaacgcctgtccagataagtttctggttgtatggaaccttcctttctggagcaatcacttccggcaggaaagattcaaatggcttaaacaagtctagaacacggttggaggacattttcaaagtaaagcgtgaaccagtgtcagtttttctacttgctactatatttaactatgtttttttcttttgctttcaccaactgaaccttgtagtaaatggagtgaggttgaattgaggactgaaaaaaaggttagttcggaggccgctgaagtttccgattgggagcaggaattgaggatggagggtgcaaagtgaggtccttgatttgttgtttttacactaaactacgttaccaccgtaacgccaattcaaggcaggaattatgcttgttgtttggcaaaagttgccgaaagaaagaatgagagagaacgacaaagagaatgagagagaacacgtaaagcgaaaaatctggagcgctgccgcgccgggtaacaagtgtgaagagagagagagatgtaaggaagatgaatacattcaatacattctagcttatagcaagctttcagcaggctcaattgcttatagcggtataactgcaacaagagtgaaaattaatatggtgacgaacgacggattcggtagtacagtgttataatgccggcaattaccgtatgccatcggaatccagatgcatttctgaacctttccactcgggaaaaccactcgtcatgtcacacggagagttggccatgaactggctaatgggatggtctaaggcgaccactgtaagaagaacaagagatgatgcaagctaaagcaagcaggtctcaaataaacgctacttgtgccgttgacagcttgtttatcttgcacatggcaaggccatcgcgtccctgcgtcccaagagtgcgcggtatacgtgcggccctaaacgaggcggtctctgttctctgatatatttcttttctttcttcgttgttttgtttcgtgtttgttgagctcctgccttcaatcggcatcgtcctcttgcgtacgtacataaaatcgttacagctttgttcacatggtgaaaacaatagcgtttggtacgctctttaaatcttggcacttggtcacttacgctcctttaaacaaaatcaaacatacaaatatacggatacgtacgcacacagaagcataaaagcacaaaagcacataagaagaccacatataaactagattatgtcctttgatagacagttgaccgaagaccaggaggtcgtccttaagcaaatttggacacaccttttccatctgtggcaagttcccgtggatggaactcatattttccctaataactccctccactcctcgtccacccctgctaagaagaagaaatcatcctggtttagcaagcttcagtcctcagaccatacacaggactccagcgaagccgctgaagcggcacacctctatgaaaagggcaagatacacaaggcactagccaatctagacccgcaaacgaccaagaagcagttctggcacgatatcaagaatgaaactccagacgccaccattttgaagtttatcagagccagaaagtggaacgcagacaagaccatcgccatgttgggtcacgatttgtactggcgcaaggacactattaacaagatcataaacggtggcgaaagagctgtgtatgagaataacgagaccggtgtcattaagaacctggaattgcaaaaggccaccatccagggttacgacaatgacatgaggccagtcatccttgtgagacctagattacatcattcttccgaccaaactgaacaggagctggaaaaattctccctgttggtcatcgagcaatcaaagcttttcttcaaagaaaactaccccgcatccaccaccatcttgttcgatctgaacgggttctccatgtccaatatggactatgcccccgtcaagtttctaatcacttgttttgaggctcactacccggaatctttgggccatctacttatccataaggccccttggatctttaacccgatttggaacatcatcaagaattggctggatccggtcgtcgcgtccaagattgttttcactaagaatatcgacgaattgcacaagtttatccaaccccaatacatccctaggtatctgggcggagaaaatgacaatgatttggatcattacactccaccagatggctctttggacgtccatctgaaagacaccgagactcgcgctatgatcgaaaaggagagagaagaattggtcgaacaattcttgactgtcactgcccaatggattgaacaccagccattgaacgatccagcatacattcaactgcaggagaaaagagtacaactttccaccgctctttgtgaaaactactccaagttagatccgtacatcagatcaagatccgtttatgactacaatggttctctaaaagtttgagccaagccacgcgacgctccatactgtatagacctttattataaaaacatctatttctttatatgtccctctatcttatttttcttttacttttatttgtataatacgcgaaaaattatagaatcatttattatcaaaaacaatcaactatgaaatgaaaaacaatacgcctgctaatacggttcgcccttcaatttttgttttttttacatgaatgagtcttatactagatgatatcatcctctcactaacgaatgctaacgaacgaacgccaccacaggcccttaaaaccactttaagcctgctatacgaaaaatcaaaacaatatggtctttcttcgccgcaactacaagcacttgtaaggttactctgtgaaacttccataatagacacagttacaaaagtgtacatcgtcgaaaattgctttttacctgatggctacttgacgaaggaacttcttttggagattattaaccatctcggtacgccaacggtattctctagatatcgcatacaaacgcctccggtcctacaatctgcgttgtgcaaatggttagtgcatgtttatttcctatttcctgtacattcagaacgagaacacaatatatccagttctatctggttacatttatggcaattctcgttcttacagaagtggataactcccctggttatttggcaagccacgacgcccgttgatgtcaaaccttggaagttgtctattatcaagagatgcgctatgcatccaggttaccgggacgctcccggtagtgcgacgcttattttgcaacgatttcaatgtctcgtgggcgcatccagtcagattactgaatcaataattaccatcaattgcaatagaaagactttgaaaagtcatcgaaacttaaaattggatgcgcatttcctatccattttgaaaagaatattatccagagcacatcccgctaattttcccgctgacactgtccaaaacacaattgacatgtacttgagtgaaattcatcaattaggtgctgattctatatacccacttcgacttcaatcacttccagaatatgttccctctgacagtacggtctctctttgggatgtcacttcattggaacaattagctcaaaactggccacaattgcatattcccaatgatgtagattacatgatgaagccatctttaaacagcaatgttttactgccgcgaaaagtcatgtctagggattctctcaaacacttgtactctagtatcattctcattaaaaatagccgcgatgagtcgtcatcaccatacgaatggtgcatttggcaattgaagcgatgctttgcacatcagatagagactccgcaagaagttattcccattattatttcggtgtcctcaatggataataaactgtcttctcgcattattcaaacgttttgtaatttgaaatacttaaaactcgatgagcttacgttgaaaaaggtttgtggcggaatcttgccattatggaagcctgaactaatcagtggtacaagggaatttttcgttaagtttatggccagtatttttatgtggagtacacgagatggtcacgacaataattgcacattttctgaaacttgtttttacgttttacaaatgattacaaactgggttttagatgataaattgatagcactcgggttgacactactgcatgacatgcaaagcctgctaactttggacaaaatctttaacaatgctacttcaaacagattttctacgatggctttcatcagctcgttagatattttaactcaactgtcgaaacaaacgaagtcggattatgcgatccaatatttgattgtgggccctgacatcatgaataaagtgttcagttcggacgatcctttgctattatcagctgcgtgcaggtacttggttgctacgaaaaataaattgatgcaatacccgtcaacaaacaaattcgttcggatgcagaaccaatatatcatggatttgacaaattatctttacaggaataaagttctgtcatccaaaagtttgtttggagtctcaccagatttctttaagcagattttggagaatctttatatcccaactgcagacttcaagaacgctaaatttttcacgataactggtataccagcgctatcctacatatgtattattattctaagacgactggaaacggccgaaaataccaaaataaaattcaccagtgggatcataaatgaagagacgtttaacaatttctttcgagttcatcatgatgagattggccagcatggttggataaagggcgttaataacattcacgacttgagagtaaagattttaatgcatttgagtaacactgctaatccatatagagacattgcagcattcttgtttacatatttgaagagtctctcaaagtatagcgttcaaaattcttagaatatgcatccacatttatatacatatatatatatatatatatattataacttccaaaaaggagattggacaatttatatctataaggcattaatatttaactatttacaagcactagtggtaaattcatggcgtcatatgattacttgtggaataagaaactaatcacattgaatttcatgacaaattttttgatttttttattcatcaaatacattctcccttccggtaagttcatcaaagtttcaataacagcatccctacctaatttcaaaaagtttttgtcagccgtgtacatgaatttgactctgccatttaccacaatttgaaactttttgaatttggactcagtagtgcgctcaacttctggccagcggtattggttccattccatttgggagttgatcatctctgcagcttcttctgaaattgacgggacagcaggatatataacggttaccaacttttgtaaattctgtactatcatttcattccttacttcaccttttttcaatgcactttctaaaatattggttagcttcatataatcagatattacagtgtttaacgatagattaacttcaaatgattccgtaattgatttcaagaagcgttggaaatcgttgtgaaatttcacttctgcatcatttaagtcggtcggggtcttgtagtctttacttattgccaaatccttctcgagactgagaatatttttggtcaaatgaagaaccttctgcaaccaacgttctataccaacaatcttggattcatcccaattcagggcatctgcaattggactttggaagaggatatgtgctctcgtagcatcaggtccatgtcttaaaatacattcatttggatctgcaccattgtatttagatttcgacattttttcataagagactaccggaaccttgccatttgatttaataatcactgtgttgccatctggagagtcatttacaaaggttaactcgtcaggcttcaaaaatttaccagaatcggggtcaacataggttttcccttgaaccattccttgtgtcaccagttttttgaatggttcgaagatgccagcagggtcgctccatgcattgatagatccgagaaatttagcaataaaccttgagtataacaagtgtaagatagcatgttctactccaccaatataaatatcaaccggcatatttttacttgcaatttcacgatcaaatggttttgaagtgtttttgggatccaagaatctgaaataataccaagaactatcgataaaagtatccatggtgtcagtttctcttttcgcagggctcccgcatgaaggacaggcgacatttacaaattcatcgattgtggacagcggattcccttttgtatccaagccttcaagttctggtagcttgacaggtagatcactttctggaacggggacaggtccacagttgtcgcagtgaatgatgggtattggagtaccccagtatctttgtctacttatcagccaatctctaattttgtatctaacgacgctcttagacagtccttcgctattcaacatccccattatcgatttccttgccactacagtgagaactcctgagtgttctccgcattctttggttaggacaccgtcagtagatgtgaacgggacagtatcaattattctttgtctttcctgttcagttacttttgaagcatcgtcaaaaaaaggtgctatgcacgtcttgatatgttcaccaggacaatttgtttgccaaaactcaaaatctcggttatcgtgtcctggacaacccattactgcactaggtgctgaaccatagctgctgaccacatatggagctgcaaatatggggacttcctctttagttaagggatttacggcctttatgttaggtaactgaaatccttccttcgtatcgtttggtaattgatcacttttctgtataaactcttttaaatccggcatttcctcgcagtatttttgtacaattgggtggtctaatgcgagagcaacatactgtacagcaaaaagagtttccggtcttgttgtaaagacaatcaagttttcaaatttggggtccgcaactttgaacactaattctgcacccacagattcgcctatccaatttttttgcatttgcttcacgttggaaggccagtccttcagttggttcaagtgctttttcaatttaggagcgaatttcgttattcccaaaaaccactgttttagctgcttcttttccacaatagcccctgatctccaagaacggccctgggcatccacttgttcattagccaaaactgtcatatcaacgggatcccaattaatttctgcttctttacgataagctaagccattttcaaaaagttttaagaaaatccattgggtgaatttatagtattcgggatcacatgtagttatttctctgtcccaatcaaaatttgccagcatactttgcatttgttgtttcatttttgcaatattgtccctagtccatatggccggattaatgcttctttctatagcagcgttctcggcaggtaacccaaaagcatcccatcccatcggatgtatcacgttgtaccctttttgtttgtaaaatctattcaaagagtcgctaatgacataaactcggagatgtcctatgtgaagcgccccagaaggatatggaaactggcacagaatatatttcgacccgctattcagagtatcctgcttaggcaagccacgggttgtcttctgtttccatttctccccaattgcaattaattttttcactgcaggtccagggccccttttagtggataggaatcggcttgaaggtcgagacagcatttttccaccgtacacacacgtcgatttattcacgtacagactctacaatatagagtactagcgccttgtttaacactctgctgtgctccttcctccaagttcttgattctccaccggagcaacaaaacgactttcttcggtttctttgattcttcgcggagataagaaatgagattcttggatcaaaaagtgtgtcagaggtagggaaatgtcaagcaagttcatgaacagaccaggagtagtatggcatggtattaaagatttttctgtggtatttgatagttaggcaaaaggaacattttcatccaagttttatcaaaatttctgttttatagtgaaaattctaagttaaacttgccaaaaacgcgtcgcgtatactaaatttcaatgtttggatctatcaacatgaatatttatatttcatgtagtgaagttcataataagaaaaaaagacaagaggcatataggttcgcaagagataagtagctgctgttaataataataaagagcatattcttgttagattgctaaatggtatgatttcgactacgattagtggtaaaagacctatagagcaggttgatgatgagctactttcactgactgcgcagcaggaaaacgaagagcagcagcagcagagaaaacgcagacgtcatcaatttgcccccatgacacagtttaacagcaatacactagatgaagacagcgggtttaggagctcctctgacgtggccacggcggatcaagataactttttggaagagtcaccttcaggatatattaagaaagtgatcttgcgaaactttatgtgccatgaacattttgaacttgagcttggttctaggctgaattttattgttggtaataatggtagtggtaaaagtgcaattttgaccgccattactattggtttgggagccaaggctagcgagactaacagaggttcctctttgaaggatttgattcgtgaaggttgttattctgctaaaatcatccttcatctggataatagcaagtatggtgcttatcagcaaggtatttttggtaacgaaattatagtagaaaggataattaagagagatgggcccgcttcttttagtttaaggtcggaaaacggcaaggaaattagcaataagaaaaaggatattcagacggtagtggactatttttctgttcctgtaagcaaccccatgtgtttcctgtcacaagacgctgctaggtctttcttaactgctagtacctcacaggataagtatagccattttatgaagggtactttacttcaagaaattaccgagaatttgctttacgccagtgctattcacgatagtgcacaagaaaatatggctctgcacctggagaatttgaagtctttgaaagctgaatacgaagatgccaaaaaactgttaagggaattaaatcagacttcagacttgaacgaaaggaaaatgcttttgcaagcgaaatcgttatggatcgatgttgcccataatacagatgcttgtaaaaatttagagaatgaaatcagtggcattcaacagaaagttgatgaagttactgagaaaattaggaataggcaagaaaagattgaaagatatacatctgatggtactactattgaagcgcaaattgatgcaaaggtcatttatgttaatgaaaaagatagtgagcatcaaaatgcaagggaactgttaagagatgtcaaaagcaggtttgaaaaggagaaaagcaaccaagcagaagcacaaagcaatatcgatcaaggtagaaaaaaagtagatgctttgaataaaacaattgcgcatttagaagaagaactcacgaaggaaatgggcggtgataaagatcagatgagacaggagcttgaacagttagaaaaagctaatgaaaaattgagagaggtaaacaattctttagttgtaagtttgcaagatgtgaagaatgaggaaagagacatccaacatgaacgtgagtctgaattgaggacaatttcacgcagcattcaaaacaaaaaagtggaattgcagaatattgctaagggtaatgatactttcttaatgaattttgatcgtaacatggatcggctcttaaggacaatagagcaaagaaaaaacgagttcgaaactccggcaattggacctctgggttcccttgtaacaattagaaaaggttttgagaagtggacacgttctattcaaagggctatttcatcttcgctaaatgcatttgttgtgtcgaatccaaaggataacaggttatttagagacattatgaggtcgtgtggcataagaagtaatatacccattgttacttattgcttgagtcaatttgattattcgaaaggtagagcgcatggaaattatccaactattgtggatgcactagaattttcaaagcctgaaattgaatgcttattcgttgatttaagtagaattgaaagaatagtgttaattgaagataaaaacgaagccagaaatttcttgcaacgaaatcccgtgaacgtgaatatggctttatcgctaagagatagacgtagtgggttccagctctctggcggatatcgactagatacggttacttatcaagataaaattagattaaaggtcaactcttcatccgacaatgggactcaatatttaaaggacttgattgaacaagagaccaaagaattacaaaatatacgggaccgttacgaggaaaagctaagtgaagtgaggtcaagattaaaggaaatagatggcagactcaagagtaccaaaaatgaaatgagaaaaactaattttaggatgacagaattaaaaatgaatgttggcaaagtagttgatactggtatattaaattcgaaaataaatgagaggaaaaatcaagaacaagccatcgccagttacgaagccgctaaagaagaattagggctgaaaattgagcaaattgcacaggaagctcagccaattaaagagcaatacgattctacgaaattagcattggtggaagcacaagatgaactgcaacaattaaaagaggacatcaacagtcgtcaatctaaaattcaaaaatacaaagatgataccatttactacgaggataaaaaaaaagtctacttagaaaatataaagaaaattgaagttaacgtagcagctttaaaagaaggtatacagaggcaaattcaaaatgcttgtgcattttgttcaaaagagcgaattgagaatgttgatttaccagatacacaagaggagattaagcgtgaattggataaagtctcgagaatgattcaaaaagctgaaaaaagcctaggattatcgcaagaggaagtcatcgcattatttgagaagtgtaggaataaatataaagaaggtcaaaagaagtacatggagatagacgaagcactgaacaggttacataattccctcaaagctcgtgatcaaaactataaaaatgcggaaaaagggacttgttttgatgcagatatggattttcgcgcatcattgaaagtaaggaagttctcgggaaacctttcctttattaaggataccaaaagtttagaaatatacatcttgactactaacgatgagaaggcaagaaacgttgacaccttgtctggtggtgaaaaatcgttttcccaaatggcgctgttattggctacatggaagccgatgcggtcaaggattattgcgttggacgaattcgacgttttcatggaccaggttaacaggaagattggtactactctcatagtgaaaaaactaaaggatattgccagaactcaaactattatcattactcctcaagatatcgggaaaattgcagatatcgatagttctggtgttagtatccacagaatgagagaccctgagagacagaataattccaatttttataattaatgtttcttcatgtaattattcaaaatattgtgtaatcgtctatttgaattcgttttcacggcagcatatttgaaaaaaaaattaatttttacatctaaacataaaaaacctaatcgttttctttccatgctgttatagagacatttattagtacgaatattttcctttctttacgagcactatagacagtaatttatataactaagaaaatggtatgctcaaaaatcaacaatatgactcttagggaaatcatgaatctctggaacaggtatttctgggatataatatacttccccattttcattaaccctttctctatccttttcgctaatagaataaatttctttaacgttagccttcaataaatcaagtacttcaacaaagttcttttgaatttggtgagcttgctctctcatgtttcgtctacaaagaccctcaacaactctcacagcgtctggttttgtttggtttaacctctcaatcaatcttccgactgactgaaccaaatattcttcttcataaatagttcccttcttaccacgagcacgcttacgctcttccctacgcttgtttttagctgtacgtctggaagcaccagtctttgcagtacccccagttttgcctgtgtatctggtgaagaatgattcttgtgttgacgtctcagaaggagcaacagaaacgtcatccgcttgctcagtttcctggccataaaaggcgtatgggttctcctccttcttcgcgcgtagctctctcaatcttcttaactgtgaattaatctggcctttacaatcggcgagtaattctgcaattataccaaaaccttcgcctaaaccgggatcgacaacttcttccaagagttcatctttcttggcctttatcgccacaagagaagcaatatcatatctataggccttacagtacaaagctacggcttctttaacattgtccaaatattccaattgaatatcagcagcatcaacatatctatgttcaaaagtcaaagaagatatcaactcttctgcgactgactcaacttcctctgggaatttctgaacagcgatggacatggcctcacgccatcttttcgctgattggtatgcccccattgcttctttgagctttcctagcatctcgtacgccaccgccgcatccgtatacatttgatttgatgacaaatgctttgcgtaaatgttataaataacattctgcttctcagaatcataacggtaaagtgctaaaccatgcttatacaaatcatgagattcaacatagtctatgacttcctctgaaacattaccatctttatcaatttcggacaagtgttccaaagctttttcatagttccctaagtaatcatcaatcaaaaacttacggcgtaaaggctcattatcttgtaattcttgtaaaaatggcagatattcacgaggatccatttgtgatttttgggcgactaataatgctaaactgacatcatacaaagatagggcagatttataaaccacgttgacgtcttgcaaaaaacacaagtaagttacacaagagtctttttcttcagaattttctagttcactaattagttttagtgcagccgataagttttgagggttttgggatgcatatgctgtaatgatcgtttgcaagtatttcttcttgtattcaggattgcttaataaaacatttagcacagcatcgcatattttgttgactttagaggttttgggatcaaacattttctttttcatatatatttgcatttcagtcagtggtgctggttccattccaaatgacttcgagatacctgaataaagggtttccttatattttgttttggtaacgtcatcttccgacaaacaggaaataaataaattgagataatcaacccttccgatttggttgataaatacttctaagttttcaataaataactctggcgcatagtcatgcaaaatatcaaggttaattctgtgtgtacgacaaacaataaacgcctctttataacgttttgccatgatattctttcttacctctgccagtaccataattcttggataaattgtttctagattaccacgtgtggcttgcaaaacaacggaagacttagatggaataacggacactaaaatggaacctctttcaatggcacgcactctttcatcttccacaccctcctctaccaaaggcaatggcttgaaatcggtggaatttaaatgcacaaactgtaaattgtgttgtgccgtggtgaacaacagaaaggaatcggtaatctccaaggaagtaactgccgaagccaaaagaacttgattagcaaataacttaccgttatttgtgataccaaatgcaactaactcagaactttctgcagaccagttgtcatcatcttctgctgatgtgttatggactctttttactctaaaatcacgtaccaattgaggaaacttggtaatttccattaactggccttccgcatccaattggcaaactgtaccatcgcgagtttcatacaccaagtggttataatcaaagtcacttcttagtaaaacgattttatcatagacctccacaatagttattaaagttggttgcgtaatatcctggatatccaaaagcgctattctagaaaggttatctgtgtcaagcaacacaccgacaatggaatcgttaataaatgcaacttgccttaaagagtcaacctcacttgtgaactcagatttggggaattcgcagactatacttggatgtttgccttttttcatttcttcgatacttgggacggctgcgaaaattagaacatctttgttgattgctgcatatatttcattcgaaaaactgcacgctacatccaatacatttcctggagtttcaaaatcacgatagtacattggaggagggacattagcaagagctagaggagtgatattcactgtccttccatcaacaacaagagaggtaccgttatcgaacggctctaatgtcggaccctgcgccatcttataagcgaaatcaacgatattgataaatccagcatcagaaaacatcaacgtgaagtccttttctgggtgccatttaacgtaggaaatgtcgctagcgtacaattcttgttttaaataccaatggtaattcttggacgtccacaactgaatgcggtttgccaatactacggctagtgcctctgagttactattccagcatacactttctaccttctcatctagaggtaatcttgtatcaaattcaccatgccttaaaccgttacgttcgaagaaaatcacatccactgaatcctcctcaccaaggtcggtttttctttgaatggacgcaatcaaagaaccttgtggtttccagcttaactggtgttccatcccagttactggctcagaagcactatccaattggccttcacgggaaaaaactctgaaagctcttctttttattgattttgtttcatcatcttcgtctggtacctcctctacagaagaaacagcaaaataatcacaatcccctctccaagaaattgtgatttcatgactgtccaatgcggttacatcaccagtatctaccatatagggcatggtcggatctcttaattggttacctaccaaacctgatgcctttaagctggctaatgcttctctttccatggcacgtgcacctttacctctgaattgtgtttcctttttaccccaaccaacggtgacgtgctttgaaatcttaagatcatctacctctaaatggtattccgatatgggttcgaacagtttacttagaactaccacgttacgatctttagtcaccatggccagcgtctcttcgtcataggaccactgcgcggctgcaattccgttgtctatagtacccataatttcaattaaagtttcagctgggtccaaactgacaggatcataagtggctgtaatgatatcaccttgttcaaagacaaagactaattggttaatatccgcaaaatgaacaaaagataataatttgtcgtcaaaagtctgaatgttgaatgaagccaacacattcctggaaccatccttcatgaattgttgcacttcaatagcaccaatatccgtagaaccgagtacacatgttatactgtcggataatgtatcaaataccgagtctaacaaagtgaaagataagtcatcttcatcgccttctgcagtagacgccgttggcttaaatttacccttattcaaggtaataagattacgcatatttgatcttagctcctgcctctttgacccactcttgtcatgttcaaccataagccattaggcatttgtactgtttcttgcctaggcatcgcttttcattactatggaaagaaaaaaaaatttgatcatcgtgttatacgtattagatcatgtgctccagccttgtcagcaatgcctctttcaattgaggaagttctgtattctgtagctcattgattctctgcatgtagtagtaattggccaggtccactacagtcactggttgatcattccctgaagattgcgcattttttgggattccgtttgcgaagatatctgtaaccattgttttgagccctctcagagatatgtcgcggcagtattgagggccatataattgcaccaacttgtgtgtcttgaactctactagtacgtcattatcaatgacgggatcttttaacagcgtttgcaaatcaaccgacttatctcgatgagctagagtttgttggcgctgcaaaactaattgcagcaacaataacacaacgtttgaggggcaatccatcgtacgaatcttgaagtcctatcagcagctaacgaagtagagaattaactgtaaatgcagaaacaaagcaggattacaccgtgatttgatgaaatagcacgttccctttgtttgtcttaaatcgcgtttccgcgatgctcgaaaaagaacacgagaggaaggttcatagagaagcagaaggaggaaccttttgatgctgctgtgcttatctgctcaggctacaacaggaactggaacatggaaaaatcgattgccaaaggtttaagcgacaaactatacgaaaaacggaaggctgccgccttggagttggaaaagttggtcaaacaatgcgttctagaaggggactatgatcgtattgacaagataatagacgaactatgcagagactatgcatacgctttgcatcagcccatggctagaaatgcaggattaatgggcttggctgccacagcaattgctttaggaataaacgatgttggccgttacttgaggaatattcttcctccagttctcgcatgttttggcgaccagaatgaccaagtaagattttatgcgtgtgagagtttgtacaatattgcaaagattgcgaagggtgaaatactggtctatttcaatgaaatatttgacgtactctgtaaaattagtgctgatacagaaaactcggtccgaggagcagctgaactattagatcggttgataaaagatattgttgctgaaagagcatccaattacataagcattgtaaataatggatcgcatggtttgcttccagccataaaaacggatccaatcagcggggatgtctaccaagaagaatatgagcaagataatcaattggcgttctctttaccaaaatttattcctttattaacagagagaatttacgccattaaccctgatacgcgtgtttttttagttgactggcttaaagtcttgctcaataccccaggactagagctcatatcgtatctaccatcatttcttggcgggttattcacgttcttgggcgattctcataaagatgtcagaacagttacacacacccttatggactcactacttcacgaagtcgaccgcatttcaaaattacaaactgaaattaaaatgaagagactggaaagactgaaaatgctggaagataaatacaataacagttctactccaacgaaaaaggccgatggtgcacttattgctgaaaagaagaaaactttaatgactgcattaggtgggttatccaaacctctgagtatggagactgatgataccaaattatctaatactaatgagacagatgatgaaagacacttgacaagccaggagcagctgctagatagcgaggcaactagccaagaacctcttcgcgatggcgaagaatatatacctggtcaagatatcaacctcaatttcccagaggttattaccgttcttgtgaacaatttggcatcatctgaggcagagattcaattgattgcattacactggattcaggttattttatccatttctccaaatgtgtttatccccttcctttcaaaaattctttctgtgcttttaaagctattgagcgattcggatccgcatattactgaaattgctcagctggtgaacggtcaattactctcattgtgcagctcatatgtgggaaaagagacagacgggaaaattgcatacgggccaatcgttaatagcttaactctacagtttttcgatagtaggattgatgccaagattgcctgcttggattggctcatcttaatttatcacaaggctccaaaccaaatcttgaaacataacgacagcatgttcctaactttgttgaagtcattatcaaatagagactcggtgctaatcgagaaagctttaagtctcttacagagtttatgttctgactcaaatgataattatttacgtcagtttcttcaagatttattaactttattcaagagagataccaaattggtgaaaactagagcaaactttatcatgagacagatatcttcccgtttatcaccagaacgtgtttataaagtaatttcttcgatattggacaattataacgacacaacgtttgtgaaaatgatgattcagattttaagtacaaacttaataacttcaccggagatgtcgtcgttaagaaacaaacttagaacttgtgaagacggtatgtttttcaatagtttattcaaatcttggtgtcccaaccccgtgtccgtgatatccttatgttttgtagcagaaaattatgagttagcttacacagtgttacaaacttacgcgaactacgagttgaagttaaatgatctagtgcagttggatattttgattcagttgttcgaatcacccgttttcacaaggatgcggttgcaacttttagaacaacagaaacatccgtttctgcataagtgtctatttggtatactgatgattataccacagtcaaaggcatttgaaacattgaaccgcagattgaatagtttgaacatatggacatcccaatcttatgtcatgaacaactatataagacaaagggagaatagtaacttttgtgattccaattctgatatctcgcaaaggtccgttagccaaagtaaactacatttccaggaactaattaatcattttaaggccgtttcagaagaagatgaatattcatcagatatgataaggcttgaccatggtgctaacaataaatcacttctgcttggaagttttttggacggtattgacgaagataaacaagaaattgtcacaccaatctcgcccatgaatgaagctattaacgaggagatggaatctcccaacgataatagttctgtcatattaaaagatagtggcagtctgccattcaaccgcaatgtatccgataaattaaaaaaataactacccattacctgattgaaagcatctttggttaagaaatggacctgacatgctacataaatagatacgtaaacagatatttaaccgagacacataagatgacctattgcaacaactcatccctgtaatgtgtttgaaagttaacccttttaatttcgcgacggatctgcgtattaatggcatttttctccaattgttgcattttcttcatacccttcttatattgcttctcggtaacaccactgaccatccttctatcagcagctgtaatcgttcttctgctttcgttagggtttggctgcgaaggtaaattttgtctatagtacctctggcccgcacgatgacctagcctagcgcctgttggcaaggtaagttctaaaccagattcatcaatagatacggtggtatagtttgcattaatgtcattttcggatgagaccaacgtgatatctacctccccatcttcttcatcatttttggccccatagacagatgaaagcttggaagtaattgctctgtcattctgaagatttttgctaatagagtgatcatcgtaagtaaaatcgtaaaatggggcgaaaagctgacgctcctcctttgtttcatatggcagcctgcaatgacgcttagaagccatatgcgctcttatactttccaaaccggagccatgaaagttacaacacagacagttatgatcaataacaatcatttttattaaaaactctagtaaaccgtttagatcaatcaaatatgacctttcaggtatgaaaagaccatgctcgctaaacatatgtttgacatttctttccacttctttattgtctttcccgcaatatatacattccgtgatggtaatcttttcattttctttatcacttggcttatccgctatatctagttcctcatcactagtagcatactcataattagagtcactagtgaaaccgtattcagagacagtatcttcaccataatctgtattcgtgttttctgttcctactgtcaaattagataattgtgaagatattgatccagaaggggacaccgatctattctgtttttctttagcaatatccctgtctttcctcttcaataagttcgtaccaacttttcttcctctctttgacttgatcggtttcttctgtttctgaggcaaagcgttactttggttcataacaggctttagaacagggaaaccaaactcatcaacctgattttcagcttgttccttttctgaaatttgcaatttctcagcaaactgttccgcaccaattggcggcaggttggcaattcttctctttaagttgtacctgtgccattcggtcttcatgtgatatctttgcaaatcactagtcttgaactgaataacacaacagttgcatgtaaagaaagtagagctcatctttcaaaatgtaaattctgctgtttttaagctgctataacccaataatgataaggtgattgtaagatgaattgtacaactgtgttgccaccgtcttgtgactattgcatatgactaagtcgttttattctctttcgtgagtggcaattttgaagaaacgacccaaaaaaaaaggacagaattctacaacacctgtacctccaaaaaacccatttcttttctgtttttactgaattgtaattcgcgcttgtctattcgtcattctgaaaaatttcacgcaaaacaactgatgacagatcttgaccatagcatagcatgaaggtgcaggaacatgaggcaggagcaccctacggggcaccgcgaaaatagctgtgtgaaagtgctatgcgatacacatataattaatggttattagatgcgcgcatttaacattttccctaactcaagtaatagctgaaataccacgaacaaaagtgtaaattagggtatgtaccaagttctattcgaatttaaaggttatgaggtacaggaaggctgaaaaatgaaaacttcgagatgaaataatccacgtcgaaagtaatgctgaaaacacaagtagctctggattcaaatcataaggacgtacagaagtgttgctgacaaatcgcttctttttgatattagaatttcattcaatgaacaacggattgaagaattgtcgtgtcgacaggattgtacattttaccaggactgaggaatgaattcaacggctttgccgaacaaatcacggcataacctgcagaataacataacaacatagcgcttattatcattgcgtatgctggctgaaacgaacctttcactgaatcagctcatatcgcatggacggaataacaggtataaaaaatccacgagttatcaacctcattctctttaaaattggaatccaatcaaccgaattcatttgtactaacaacgtttcctattattgcagataaaatggctcacgaaaacgtctggttctctcacccaagaagatacggtaaaggctcccgtcaatgtcgtgtttgttcttcccacaccggtttgatcagaaagtacggcttaaacatctgtcgtcaatgtttcagagaaaaagctaacgacattggtttcaacaaattcagataagccatcataaataaacaatgacgaatatataaatactatatgtatacatatatcaaactgcctttgtactttttatggtcctattgctccccgaatctttagatcctatatgtgctcttgagtatcgttggaggattcgtcaactcgaggtacgagatatgctttgtctcttccttgtattcgcttgctgatattccgtaccctagatttcttactttcgaaatacattacccggatcaattccattattttcgcctttcaaaaaatttcccggttgtataaaaaggcaggacttcgacagtcaacaacaattttgagtatatttaccacattttttctgatttttttttaagagggtgaatcaaaaatttattttttacacggaaacgatgccacagttgactgaacctgtcttctaacagtagttaattgccagtatttcaaacaagatttgaaatacgagtttcccagaataatttatttggacaggataggaagtccgatttctgtgttgtctcaaacgaggcgatagaattgggatgtcgaagaaagtctacattactcatatatttacgtactgtctcttgcaggtaaaaagtcttgaagatcagtttcaatattgaaactaacaaatttagttagtttctgtacttagtccgaggtatgtatgctaagattagaggatggtaaaaaaatcagctatgaaaatacatgtacgtacgttgtcgtgcaacacaaccccttcactttctatttcactctgattcagaactattattcagcttaggaggcgcggaaatctcgaagtctttcattggttgacgaacgggagctacaaacagcgtcgacttgaatgccccgacatcttcgatcaactggccagttggatacttagcggtgtccaattcattttcattgagctctttgttttccacttgagatttcaaatgtagaatcaacttcgatgcgttctcgctcattatataattctcataaaaatctatcatttgctgctttgtaatgttagcaacgagcttagcctttttttgacgatgtgtgaaattgtaatcacctaagtaaattgctgctgtgtatctggcgctttcctcggccatattcttgaatttttgcaatagactgttgcataacgcctctttgtgtttttcaaagtcctcttctggcatatccctcaaaacctggccaaaagtttcataaaaattgtttattctccattctagatatggcgtggtatgttctgactgaatcaagatcctaatgttcgctgtaccgtgattgttcaaactcgaactaaaaacaacgtagcccaattgctcttttgttcttaaggtatcaaaacatggctcgtgaatcaattgcgcaaataatccgctgagggcagataggtcttctgaatagacatctagctgggtgacatgttgaatacatgagttaacattctgggagtctttcaaagcagtttcatatctgaaagttttgcctttaggaagtaagtaggatctcaaccggttgttagaaacctgcagattatgaatgttgtttggaatcaaagacttgatcagagaatccacctccaatgcttcttcatgttttatgtttccgtggattaaagtttcaaaataaacgccttcgtaaatggtgggtatgaagttgatcaattgttcaaaggtcaatttttcaaagacttgtaatttttctgcagttgaccaagaacgttcatttattatagcattgtagtaattcgacatttgtgaataaggaacttcatataaaaggtttttcaagtgacgtatggtcttatctttcaaaatctcaaaacgatccttcttaggttcgaatgaattaacgccttgtaaaaaccttgttaatagaatgatcaatttttcgttgaacccagacgcggtaatggcgaggccttgattagttttattgaatgatatacgaagatcggcacaagcagcatcatattgtacatctttcaaggcatcgttggccagctgagtgtatagcgtagaaagcatactattaatgatgcttgcatgcgtatgtggaagtttaaaagacaagtaaatgtagcctcgtggttgccagaatcggtcgtccttcttgtaccataatttgctgacgtcatcggataataacaaaacaggttcatctaatggttttataccgtcaattttatcaaccttgaaatttgttgaaacgaattcatttggacgtggcaaagtcagagcagggttcaaacctggcgatttcatgttttttattaaatctgccggataatctaccactttatacgcagtaccataccatttttcagcagaatctgtttctaaactccttgagatcagagtaacacgagaattttccgggaccagagcgtccgtatattgggtaagcaaatcaggttcatatttcgttaacaaacccatggctaaaattctgctaacaggaatgtaatccttttccaagcattttgccaatgatgaaactgtggaagatgggctaccagcttgcttaaacttgaaggtagcattagagatatcttgcagttcattgaatatccatttttgaggtagtgagtttttcaacatttcaatatactggaagatcaagacaataacatcgcgatagtgtgtcaacccgttgtctgttaaatctatatcgacagcaaaaaaagcatttcctttggacacagtatgcccaccagcagatagctcattggcccagcccaattttttcaaatgtgctagtaatgaaccggacccttcatggccgattaaatgacttaatatcctcggtggcttggactcccaatgttcctccatatcagggacagtgaaagagatttctagttttttcaaatctttcacaggacggacttgaattattttttgcaaatgctcaggctgcataataggttccgcataaaggggtacttcacgaccgttattggctacatccttgaagagatcataagtccaatcagagagagtatcaaggtcttctctaccaagaatacatagcttcattaggttagcggagtaaaaattcttatggaattttaacagttcatctctaacatttagtccattttcctttggcaatgtgcccaaagtttcgatgtttcctgtagaaaatttgtgatatggatgttttgtattggtcaaagacttgtctaattggtaaattctccaaatatcattctgtaagttctttttgttttcgctgttaacggcgttgatctctttatcagtagagtccttgttgaaaagaggacaagagaaaaaccctgaaaacctgtctagcgcaccaaataaatgttggtgattaacctcaaaaaaataatttgtgttttgcgatgctgtgtaggcattggatgaaccaccgtgcttgcttaaatagctcgagtattcgttttcgtctggaaatttctcagagcccatgaataaaagatgctcgcagaaatgcgccaatccaggtaggttctttggatcttcaaaggcgccaatattgacgtctagcgacgctgctgctttatctgcttttgggtcctggatcaacagagccttcagcttattaggtagctcaataaaccgatacgatctttcgtctaaatccggctttaaaaagtccagattgaatgtcttaaaattggatgtcatattataaggatttgttgtgtaatagcgtgataagcacgtgaatggcttgaagcgtcttacggtgaaattgagactgataggtgagaggtgaaccaattgagtgaggagtggtttagttacaaatgcagaagaagaagctaaaagagatacgcccatacagagcaatatcaaaatgagcaagaatgaggtcttccgaatggttggttctgacttactatttgatttcactttctctgattcattcaggaagaaaagggcgaagtcctcgaaatgaaaatttcaacatcattaacagaccggcgcgcgcctttacaatttagtatgtacgccaccaataaaagctgcttaaacaataagctagaaagcccaaagggtgttaaatagtacagcgaacccttcagcaacggtacatcaacaaccccttgaaaagaatagagacaatacagctacagtcatccccttctcttgtatttttggccacaattgattgtattacatcatattttgcctgtgcgcttcttctatcttttccgcataaactaggggaaacgcgatgaagaaatggattggctgaaaaatacaacaattgtagtgttattcagtcattcaactgacaaaagtaacaaacacaagaaacgtcaagtccagtgcaatatgcgaaagaacactttagatatggtcactataggtatcgcatgccttgtgggagtctacacgggcacgagatttttcgagcccattgttatcgatagattgcgtaaggatggaaacttgagaacggacattcccatcccagaatacgacgaggacggaaatctgttaaaggtcacgccgtctttatcatccacaccagctgcaccacctacaccacctacacctcctactccaccacaacagtaaggaagcgtactagaaaatacctctatactttcttttcctgtatatagcatcaatagtaaagccattataacgttacaaaaacctattacccggaaaattactatttatagaagcattggacccatgcaccacatgcattaggacccattatttcttttttacaatttttccgttaatttttcacgaatttttcaccgtttataaacactctcgaacttataaacaaagggatgataaatagatttcgccagttgttaatacacacagggtcaaagctcacagcactactacactcgttcaacactcgttatatattatcatgcgtgccaccactttattatcttcagtcgtttctttggcattgttgtcgaaggaagtcttagcaacacctccagcttgtttattggcctgtgttgcgcaagtcggcaaatcctcttccacatgtgactctttgaatcaagtcacctgttactgtgaacacgaaaactccgccgtcaagaaatgtctagactccatctgcccaaacaatgacgctgatgctgcttattctgctttcaagagttcttgttccgaacaaaatgcttcattgggcgattccagcagcagtgcctcctcatccgcttcttcatccagcaaggcctcttcttctaccaaggcttcttccagtagcgcttcctcctctaccaaggcttcttccagtagcgcttcctcctctactaaagcttcttccagcagcgctgccccatcttctagcaaggcttcttccaccgaatcctcttcttcctcttcttcttccaccaaggctccttccagtgaagaatcctcttccacttatgtctcttcgagcaagcaagcttcctccactagcgaggctcactcttccagtgctgcctcttcgaccgtgtcccaagaaacagtctcctctgctctaccaacttctaccgccgttatttctactttctctgaaggttctggtaatgttctagaggcaggaaaatccgttttcattgctgctgttgccgctatgttaatctaattatctatcactttatttctaatgggttaaggtatctatcttttatatttcttatttcctcttcttatatgatgcggatgattttatttcttcaaaaaacattttaaaactcctctttatttcgttatgttccagttcactacgacttcttttctcttaaagagcaaataaaagtatataaatctatattaaatgaaaatcaaaaaaatattttttcgatcagctccttgttcttttcatttcaaagttttttacattgttacacatgtgcatgaatatatatgtttgcagaatatttttggcgacgcttaactcgccatttcagtatatgtcggtggcggtacatatctgggcagagcttcagcttcaacgtgctctctaacttgacaaaagatctgaacaggatcaatgtttacttcagattgcttcctaattccattgattccccattctatcagtagctgtaaactgaatgttctttttatcgtgcatgtcttgaaactatacaacctattgccgcgatgtctatagtcttcttcattaaataccaactttcttaaaatggggtgatcctttaaccgtaattcacattcaaacatagaaccatcaaaattttctcgtatttcgtttaagtccaaaagaggtttattggatttgagctgattcaaatcaatctcgattagcttcaaagaagagtaattgccgttcgctattccctgagataaatatgttgtagtctctagcaagttcagttgtagtttaagtggggtaatttgcattttgctcaaacttgctatattcccctccatgactacatagaccttgtcaaaattttggctgccagacctaaacaagtagtctttcctgtatatttgcttcaaatctcgacttctaacctctattctcatattgctttccccatcaggcaaccccattttataagtagatgggaaaactttcataccatttactaggcgagtagattgtcttgttgatgtgactgatgataccggtctcgatctaatgtcgccgttttctatcaatatagaattagcttgagaaaagttcctgtcactttttatatatccgactccattaacgactttgacgtcctttgatggcacctttaaatttgaactattgaaaaattcattgttggtgaccatactatttcctctactattgttactgaaggcattaagttcttcattgtcatcttcatcaggttctataataagatcttttggctcaggtataaattcgaacgtctcgatttcccttatcagtttatggaatggcttaaaccaagatgaagatttccctagctctaattgaacttgcaccatatatataacttttccaaaagagtaaaaatacaaatccagattatcgattttattaaattcttgccaatgactattgaacgtaggtgggagtcgggcattacttcttgtcacaaacgctactgtctttgccgtatgatttttcagacattcaggctttctgggaaacttgtcaaattgaaagctataattatatgaacctggtttaactttgaacggcttggaggagccatcaagagcattccatacattatctggagggaaaactctctgttcgaatttcattaatgtatgaaaggatttgttgtcttggcccggcatcatcatgccattctgttgaaacatgtactcttgatcaatttttgttaaggtctctgagaatccttttagaatgacggaaattttccttatagatagcgcttttgttaactgaagactaactatccctgacatttgatcattagagctataaaactccccgttgtacggtgggtttaaggatattgaaatttttggagccatggtttgacaaactgtatggttctcaaccttctctaatcaaaagcagaatcttaaatataaacactcacagaatatccgttggtcaatgaagtaattctcctttgtactggctgctttttctcctctagtttatgtaattctacttttggatgggtgcgactgcttttaattgattgagtggcggtgttagaagggctgtagagtcgaaggcttgtttctctcttacgcacctcttgtgaaaagggcgtgcaccttccccaggaccctctctcaccctcaacccgcattttgctgagaattttcaccaaggccctaggtgatattagattccacctgactaattgcattacagccgacccaaggcaatatcagtttaataaaatatcatgtatctcaccctcttcttggtattagtaaagagacgcctgatcttgtaacagtggtgaagattgtactagagcagaatcaagaatttaaaaagtgtaaaggcaaggcagaggcgatgtacataaaacttcgaagtaagaaatatttaatagttctcgccacatcactatgcagctatataaaaactactataaacgtttgttttgttccttacgcacaatatccttgcctagaaatcgtttttgaaatttaaatttttattaccatttatttgattcgccttcagaaaaatatggaagagtgcatatttaaaaaggactatttcagcatatagtaaaagtcaggttatttgtttatttgcgatatcagagtaacttaaactaactatgcagggcacttttaaaaggttttaccatcccacgcttacgcggatgtccttcttggataaattcctcaagcctatgatggcaacggcttccccaaaggaataccagatcaaacaactggtcaagccaataggcttaacacaagcaccaaggaaaagcaccaaatactcccaggggaactctttgagggatatgtttgattcggaaaagacaaaccacagagttaaagagttggccgttgaattcagcaaatctggactttatgacgtgcaagtcttccaaaagacaaaggggaaattgtttatagctccagtttcatattggaaagaagataaagctttgttttttcctcatttgataggaacggcaatggatggtacgaaacaacagaatatcgaggatatgttaaggggtaaaaccagtatagtgaggttatttagtacagcatctggcgataagttgagtagttcatacttccaaggaatcgtagacgataacaaaaaaactgactacttgactgaagctgatgcgcgtttaagtttaaatgacagtaacgtccaaatcatcgaggtcaatcttgtagaaaacgctgtgaaaagtgctctagtgaaaacgcttgctcgttgggccaatcgcgttccatcctggcgccagccattttatttcgaatgttctagaggccaatggccattttccgtcagggaagagctcttttgcaataatgtcttttctggatacgtctttcttgtggaccagcagttaaaaattaggtgggcagcttgcggggaggctactccatctgaaaaggaagcattgtggaagtttgccaaacgtctgtgaagttgacgctttgtgcggcggccaacaagggatgggcggctatttggcgatcgtgttcattccccaaactaacacgaagagcatgagagagaaaaaacaaaagtgcttgaaacaggtaagacgtttatcattgatatcaccaaagaaatatataatgccggattctatttttgaacagccctttgtttactgtggtgtttgccacagaagaacatcgcatggagatccattgaggctgacctcatgtgctcatatcctctgttcgcagcattctccattaacatcaaaggtgtgtcctatatgccgttcgagcgatatctccatcattaaccttgtggaatctaaacagctgcctaccgacattaggattttttttgagccactgcccccacttttggagtcgttatataatgtttcccaattccaactgaatgggctttcgaaacagtgtcaatactatcaaaatcattgtttaaagttgagagaaaaatgtgcaagacaacagcagctgctatatcaggccaaaatagagttggattctatggcgattcttaagaaaagaatacaggaattagagtcagttttgaatcataacaatgtttcttcgatgtcagttggtgtgctaccaacaagaaatagccatcaaaatcattaccagccccctccaaccgttgatctgacagttgatgataatagtttagaagaattcgaagccaaatcctttattaaaaagttgaaaaaaaactcttctttgagaaattcttcaaaaaataacaatggaactgtcactccctctacaagtggtcgtgtaaataaaaaccagcctctctttatggagacattgaataatcctaatagaaatagcattcctcctcctggaatgaacccaaacgcaaatagtaatctacctaatatttcgactattgcagaatcaaccaatctgaacagattttcgttctctcctgtgcgtgttgcaaaaggcttcgatggaaagttgccaaatcttgacatcctcacgaataatggctctgtatcttccaaaaatatatcaagattatcttcagcttctctccaaccctcttcgcctctatcttcatcatcaaataggcttattttaccaaatagtaacctcaaagaattgcatcattcaaatacacctttaacaagtacctcgacgcagtttccctcagctttagaaaaattaaaaataacaaggaagagaaataatactatcagcggttcgaatagaataacacacaacttgagctcacacgtaagaagcagtggtcttgccttttcatcttcatcgaactcattgcaacaaagtaaactgccgaaatcaaatatactaaagcggtccaattcaactcagcaactgactaatacacatttgaagagtgataatcatctgccacctcgctcaagtaatactgtgttgggtagtagcaagaaaaacaataagtttagaaggattaggtaaataggtgtaaggattccccgtgacgaaaacagccttcagaatagatagagtatgttactgtattataaaagttattctattttcttatgtgttactatatatggtattattttagaagaaatttgtcgaattatgttcttcttagatccttctttcccgccgtctcaatacgaaggcacaaggagaggattatgaatatatgaaaagaaaattgtacaaataaataaaacgatgatatgcgcacctaggaatagcaaagaacacactctaaaacgtctcaaccaagcacgctatgtacacacatctatccttcaaacttatgggggtgttttaaaaagcacctgactttttcaattgaacatagcaggcaacaaatggaacagcaaatccaatagcgaagaacccgaaatgagataaggcgtaaggtgtctttcttcctttgactttgaatgggatattttcatacacaccgtctttgaagtgtactgacctcttcatgataataggtctggtcatgatattgctacttctcttagctgtcgttctaatcatctgttggcacaacattgcgtaatggaaatggataacttttctgtttagtttgctctgtggctctatctagaaaattaaaggatacaaaactaattaaccattcttataaatcactaagccagcacaatggtttctactgctgtcagcctttattttcaatttttcttagtcccctagcttttccgtaaacaccgaacacttctctcgtatgattggtgcaaaccgtttggtgaaaaaaagcacatttgcatatacaaaaaattaacaaatctatcatataataattaagatatagagttcatgatccttgtgccattgatcaagccatcggcgatgatgataaaccttttattgataccttttttacctagtattttttgcaaatgcttcattatagctatttcacccattgttacacctccgaggaatactacgagtgcaatatcctctgcagcatgaaatgtcccattagatccgtctatggaccgtctattattgctcttgatgcttgcattgatcttttttgtaatggttcccgggacccatatactctcttcgatcgcatgtgagtctccatataactgttcaattaaatcctccgtttgagaaactctaggttctcttgacagtataaaaggctgctgcgaggaataattatggaacaagatagacctatcatataacatctgaaccagtctcattgtcaagggcactacaccactgtaagcaaaagtggcttccgagaagtcatcgttctcatttgtgattttatcggcagcatgctcgtcttctatgggtactgtattgaaccattgtgaaatataacggtattctttctgtaatcttgttgacttacttgttgtaatatgcaaatcagtttttcccgttttgctagtgaaaaatcctaactcagccaatgattcaagttgaaagcatttttcaatgccccaagagtcgatcataaaggttcttagatattcataatccttttctcgaagtgaatttttacaaagagacaataaacagattaatctgagaatcttcttttgatcaacctcgtactggtactgcaactcgagtataatatcttcaatgtcgttattaagtgtatttcccatcaaaatttccagctctaactctaagattttattgaaagatccgtactcttcagtctctaccactttcaaaacgtcggatgataaggttgtgtgatttttcaaaaaagcttgcctttgttgcaaagaacctaaggaatcaacgaattctttgatttcatgtacgctctcggctttatgccttgtatcatattgcgtttgtagttcctttgccaatttatttaactgcggcccaatcgacccaaaatttaaaaatttcaaatcattccatattttatcttccttataattgaagttcatgtctttctcctttatctttatgccagaattgaattcatatagatcatctagtattcctgcatacgtaagttgtgtcaacaatggcgttataggatcggtattcctttccaagataatcaagtccatttctagtccacagttggttcgttcaccataaagcgtacccttgatgaataaatcattctctgtttgatgctcatcgattcgtttcttcaaaagatggctacatctcttagacagattacctatcgacacaacatttgttatgatactattagtttcaaaaatcaagctctgcaacgaattgaccatatcatcaaccagtattgactctgtggcactctgcaaagaacgtaagttgggataatacatgtttacattttccatgttataaagggaatgagtcaatagaacattttcatcaatctgtgggaagggcaagagatcccaagggtaaagggtatattcgttcgatagctcctttaactgagattcaatgacgttagggaaatgtgttttttttgaattcaaatcgaaaccatccttttgccattgctctgtatcctccaaagtattttggaaagacggtttccatcgacagtatattatatgcaaagatgataaattgtgcttttgagcagcatcaagcagttgtggagggagtcggagagatgttctgacatcaataagaaaaataagatccatttgcggaacgctgcctaaggcactcggtaaatcgtcacttagctgatcatcgagtaacgtaattttccttacaggagttgattgagtcaaatcttggaaagttagcaaactattgagtactggcaatacacttggttgaaccacaagaacttcatcattttgagatatctcatttaaggtagcacatagtccatcggcatttgttaatgaaaatttcttagtattccaaaatctattcatcgtgaaatgatttgataaagttggagatgggcaatatcagctttttcttcctttctcgaattttctatcttttaactaattaacatataactagttccaatttgctaacctttatgatattttatttatgtatgttcgtgtgaagtgattaatatattatacaaaatgaccggagttcagtataatttctatctactattattgagcacacaaaggaaaagaattgactatgaacaagcttacgaagatgaaccgcttcttagagcaaactcttcataataagagagcatttctggagtaatgcccctagcaattcctttaaaagctttctcaaaatgacgtaattccacttttgcgacatctaaatcttccattatggcagccaagcccgcttcttgacaaagcagcacaacttcagctccggaataaccttctgtacggtctgccaattcatgaagatcgactccagactcttctgtattaaatttctttgtgcacttctttaagatttccaagcgggcgtttacgtctggagggccaacgtaaatgtgtctatctaacctaccaggccttagaagagcagcatctatttcatcaggtctattcgtcgccgctacaataactacaccctttaactcttcaacaccatcaatctcattgagtaaagatgtgagcacgtgattagctgcagaggtggaactcccgtctctatcaggagataatgcatcgatttcatcaaagaagataatacttggagctgcagagcgtgctttgcggaaaatttctcttatagctctttcggattcccctacatacttgttaaaaatttcaggccctttcacagctaagaagttgatacccgattctgtagcgagagcttttgcggttaatgtcttggagcaacctggcggcccgtaaagtaatacaccttttggtgcagaaattcccagcctggcaaaagtctccgaagcctccaaaggcaactgtatcatttctttcatctttgttttaagctcttcttggccgccaatgtcagaccaataaacttttggcatttctaagaagatttctctcattgcgctgggtctgatatcaaccatggcgctctccacatctttcaatgtaacttttagggaaaacttgtcaatattggcgtctgttcctagtcctcgttgtatcgtcttcataactgattctctgcagagagcagttaaatcagcaccaacatagccatgcgttttagaagcaatgtacttgatcgcttcagaatctaatacgtgacgatccgaggacattcttgagaattgcttagttaaaatgtcaaatctggcatcaacgtctggtataccaatttctacttcttggtcaaacctgccaggtctcctgagagcagggtcgacagaattaggcctgtttgtagcagcaattaccaccactttacctgcagcgcccatgccatccattagggtaagcaatgtagccacgactctgctctcaacttcaccggagtcatcgtttgctctatttggtgctattgaatcaatttcgtcaatgaaaataatggaaggctggtacttccttgcttcattaaaaatatctcttaatgccgcttccgtttcaccaagatatttggagacgattgaggggccattaatggttaggacgtgtgcgttggacgtatttgctacaactctcaaaagcatagttttaccagtacctgggggtccgtgaagaagtatacctcgagggggagaaacaccaaagctactaaatagcgtcggttgatgaagaggtatttcaatagcacttttcagtgattcaatctccttgtctaagccgcccactgctgcataggataagggctccggaagattgtatttacgatttgcctgggtttctttcgaaaaagttatatgtgtggagccttttctgaatataaaaggtggagatagataaaacaggttatctaatccaccgtacatatcgtccatgttaagatctagttggctgacgtcgggaagcgaatcatcgctcgcatctgtaattacgacatcaatgctttcatcacctgcttttgtttttaagttttgaaaaatcattccaggcattataacgccactatcatccagtagcttttgaattactttttcctccatacattccaaaatattatatccttgtaaggaccccacggtaaccttagtggcataaggtggttgcacctgggctttctttaattctagacgatcaccaaggataaggttcccaacagatcgtatagttgtggaaagggtgataacattaacaggatgtacttcttcatcacccgctctagctattactaaaataccattttcgcctatcttaccgacagtacaaaatgatcccggatttatctcaagcgaggataatacgttaggatgaatatatgctgtgcatgtttccttgccatgatctttagaaggatgtggtctggtaataaattcagcaggcaatttaaatttggatgcttttgcatcagcactattagaacttgccgatgatttctttttggaaccggaagaactagatttaggagccattttcctttctatgattgggcaattttgagaatgggcaatgttgagaattcaattgtatattgttcgcatattagtttatgtgatgaggcaatataaaattttcttacaatagtccgcccgttgcttacatgaaagaaaaaaaaaataaagatggatcgaagtggacttaaaaactatgtatacgtgtgtgtgtgtgtgtgcaataagagttcgaaaacattaacttttataaacatgactcacattgagaataaatgagctctctataaatacaaacttgcggcgaaaacaatatctctcttaatcaactcttgagccctgctcatcttcatatgtaatgtggaattaccaataataatagaggcagtcttaacttcgcggcaaatttcgtctagccaagtgataactctgactacagtaccttcagcctcggggctcatttccatgatttctttgaatgataaaccacgggcccactcatacaccacattcatcatggcaaacctttttctgtccaaaaactcagcttcatcctgagttaatggaatctgatgcgtattgaaaacacaaagcattttcttgtaaatttcctcaattctttgtttaccctttgctagccttggtgtgacaataggaggctcctcttccctggttttcccctcataaacaaatactgataataaggctacaatctcttcaggttcaaagcttcctaaaaagttgtctaaaattaattcagttaaaactaactcataaccagaattaatttcacatgccactctaccttttaacagcacgttgtggttttggtcgataaattcagtgtctttcagaacagccaatctcttttcataatcgggtagtaagctcagattttggtcagacatcaaatggtacaattcttcaattttctttttaattacatgcgccttaaacttgggaacaatgtgttggcttaggttgggacatttaatgctttttagtttgaatatctcatcccttatatttgtacggtctaacaatatttggtgaatttttaaaccttgcttttcaatgttaattgcttcttttagcgttttgccgtccaaaatgttatttgtttcagcgttaaactcgttcaaagcggcaacatcctttttaatcacttttcccaagggtgcggcaaacttgcgtttagtgatcacttcaatagccgtcacaggaacttcttccatataaaaatcagtcttctggaatttagggaagttccttcttctgtatccatccgcttttggaaagtatattaaatgatttggctcaccatttgggagtttgtatggttttgtgaacgtcataatgacacaaacagcatccttcagagaaactttaaatacaaatcctaatttcaagcaatcattggggtccctaaaagcaacgagtctgccctctttcaagatatgcaatatcgaaggcgatttaaccatttcttgcattaggttgactgttgcctccttatatgccagcatcaattccaaaaacttttcgatatcattatcacagatttcacaacttttgtactctatggtttgtaattcctcttgtaatactttgatttgtttttcatgttcaggttgtaaagtttctttggcattctcactaaaagaatacttgatcatttcttcaactctcaacgcctcaattcttaaaagatttaatatcatattgtatgttaatctaaactgagactgcaacctcgtcggaacacccatcgttacttctttgaacgtagcaatagataaaggactattatatgccatcacaatgactgtaccagtggaatccaagccccttctaccagctctaccagccatttgggtaaactcacctggagtcagttctcttaatccattaccatcatgtttacggatgctgctaaagataactgttcttgtgggaaggttcaaacccatggcaaaagtttctgttgcaaataaaactttgataaaacccttggaaaataatatttcgatcaactccttgacaatgggcaatagccccccatgatgaacagctataccacgttcaagtaatgatctggttttaagaatttgaggcaaatctctatcctcttttttcaaacgagtaatcgacttctcaataaacatgtggatttgtgatttttccttattgttgcagaagttaattccctccaaccagtcagcatattcctcgcacctctttttactaaatacgaaaacaaccattggtagaagctctcttttccttaggtaattgacaatttcgggccatgtttttttcgaaggaccatcttgagtgaaaaacttacgcttgttggagccaattgcgccagcacctcttgaacctccacggttggcacctccacgtgttgaattaccacggcctcctcttccatctcgagtattggatccaccacggccccctcttgctgtggatccacctctcccgttgtcagtttttgaaggagccccttttgcactctccccatttagaatctctttatgtttcctgaaattagcttctaaaaattctgaattttgattaataaccggtatcagttcctttttagcccatatatttatttccaatggaacgggtctttttggtgtggaaatgacataaatatttttttgcttagttcttccaatccaattagcaaactcataagtgttaggaacggtggcagataataagataaacttgacatgctgtggaagcataataataacttcttcccagacaacaccacggtcttgatcattaacgtagtgaacttcatcgaaaatgacaaactctacatctctgatcaaatcggcacctctataaagcattgatcttaaaatttcggtcgtcataatcaaacagttagcatccggattaatttgcacatcaccagtaatcaacccaatattaacatcgtcaaaagtttctttaaagtctcggaatttttgattggataaggctttaatgggtgatgtatatatagttttagtcatgtttctatgtgccatggcaattgcgtattctgcaacaacagttttaccagcagatgtgtgggcggcaacaaatacggaatcaccttgttcgagatgatagacggcttccttttgaaatgtatccaattcaaaaggccacgatctagcggggtttggaatcaactcatcgaaattttcgatcttatggttcaaatcaacaacatgggcccattcctttttaacaggaacacttttcgaaactggtttagttctgccaaagtctattccaattggtaatagttcatcgatttcggcatcatcagcattatcggcagtcgtttcttcagtggcttcctccataatttcttcagaaattgacttggcagatttttcctcctcttttaactttgcctcgttcgcctcaatccttatgtctaattcattatctatctcatttagctgtttcaattctttgaactgtccgttttgatcctcattttcagctggagaatccatcggcttaatgcctctattcataccctctggaatatcgaataaaccttgaccatccttgtgtaacaatttagtagcgttggccattgtagaagatccattttgttctgaatctgtcttgacagatttcatgggaattccgcctggtgtgaaaggcaattgcgctgtagaaccccttactgagttttggttatggttgatacttctcgtaatcgacagtgaatttgatgcattggcatttgcaacttccttcaaatcaacctcttctttgtagcctgaaattttaccttctaacccagttcttttaaactggtatgatgttctattaattgggtccgggactttcagcaattccttgtaatctagtttaccagagcaatcttctggagaagacgtatgtggaacgtcttggaccatgtccaacaagctccaaggaagagcattagaaggtctcaaaaatctatcctttatgatatcatttgcatgctttggttcatcggtgctctcaaaatctaatttagtaatgcgatcttcgaaaagctctacgtctgcgttgttagtgatttcttttaacgattgatataattcctgtatggaactgctactgaatccctcagacatataaattagtattagtacagtaaattttgtgagttaggttgttcatatcggaaagaactatgtggcaatgtattatagtttctgcgttgacttttaaattgatgaacaggttaggttgtctttcaatacttcgtccgtcgtgatatcattaactaaagttatgccatccgatgggcgttctgagacaagaggaaatttttattctaattattcattattatatagattatgaattgatctatatgatgagatcatgtgcaaatgattaaccttgttaggtttatgtttttttttgttttaaatttgtgagctttataatgttacaaccgatatgaaaatgaaaaattacctgttattcctttttcaaacctctatccgttcctaagatcttttctatctttattttttttccttccctttttgtatatgagcttaagattaccacttaattaatcaaaatatcaaaatggtgctcattcttctcagtcgttgaagataatcaaattcaaaattcagtcactcttcttcactttcgctgctaacatcgtcatctgaagatgaggaaaacccgttgtgtgcagcgctttgaatttggcctggggagccgttttggctcagaggtgaagcactgtctaagatagctagtttattttttatcttttctatctgcctactctgctcctcttggcttaatgccttagatcttctctttctgcttcccgcacttgtaggcgacaaggacgaagcatctcgcgtaacacctgaagtaccgtccaaaccgttagaagcaccggatgagctttcatattgtctaaagaaagtgttgtacaatgttaagatggtgtgattatctaaagtgtcgaggtcaagttctacttcatcgtcttcagaaatattgggcatggatttttttattatgtcgattgctctttctaatttggaagttggtaaatcattgatcctctctgtaatgatacgtttcatatcatatgtcactactgttttcaatttattctttttatctcgccttcctttcgaagaagcgttcttagacccactccttcccttcgatcttttgccgcgtttctttgatccacgtgctaagcgcctctcttttcttattttttccagttcttgcttttttaattgttgcaactccactttcatccgagcaagttgttcttccaaatactggatggctggatttgtaattatagtttcatcgatgtcagactctgaatactcagattcataatcgtcgtagtcgccttgggtcctcgaatcttcatcggaatcgtagtcatccaaattaggcctatccgcccatttggaattgaaaacttcctctagacgatgacccatcatattaacgatcgtgccatccggattgaacgtgtagcagtttttaaagaccaacctcacgtctctctcaaaatcctccattgtttgatactgccagtcatttaatttcttggcgattgtgcctaaatccattggctctttaacataatcgaaataagtcggcaaattcatagaaactgggtctactggttccaaaaatgggtagttataagaggcgtgcttcttggccatcaattcctttagcacactctgacaaaatttcattgcttgttgtagtcttttggatttcggtttcttcgattcataaggataaatatcctttgatttcggcggatgtatagtccttttcggcctcccattatgagtttgggctcgtctaattacaattggggcatcctcttgggcactagaccgccgtcccttggctattacaggtggagcatccttagcaggcatatttagcatatgtttctcgaaagaagcttgtatgtttcttgccatttgtgatatgcccgcatttggaccgttgaatttaatactgttgttaaccatgagattgaaatcctccgtgatttgctccggaacttcataagcgcctacgttcaacttcctctctatagtagacaagtccattggcctctttatgtagttaaagtaaaagggaatatccaatttcactgggtcaacaggttgtagaaagggtctcgcatccttcaagcgtttgacagctttaatcgcaagcaatgcatgtttctgctggtgctttggtattggattctgagggagattattcatatcgggctctggaggaggagcaggggcaggttcctttggaacctccatcggaagttcttgttttgagttttcatctaaatcctcttgtttggtaccttgtcctccttcttccttcttcaacccctgctgttcgtcttctgcgccacttccggtggcgttatacccattttccccgttagccgccagggtggcgccttcaataccgttctctgcaagtccagcaggcgatgatgttagagcatctccatccagtctagcctttttgagatgcaactggttattggcggggttttcttcttctgcgagtccattcgaaggatccccttgatctataggcctctttagattactggaaacgtcgtcattgacattattaccattgacatccacatcgttctgtacgggtgtgatatcggtcattacgtacgtttatcagagccgttgagattcgaccgccttttagcttgtttactgtggcaagggagaaaaaatcaaattatttgggaaggagcgacccagtaggcttaattaagggacaagaaaaacccgctttgtttaaatacttcgcgacgacgcgcgacaagcgacgacggccgacgttgtgagttcacggagcaagcctgaagttgctgcacacacaaagtgcgcggggctactacagcgggggcacgggtgcatacatcttcaagaagaaaaaggtgctgggtaatacaaacacgaatcgacgtaaaacgttattgtacttcctttccgcggctaatagcaactgcagcgtaggaataaatatgccaaaagtgtaaatccaagcgcctgatacaaagtagatgttgaattgttttaaaagacttactcaagtaccaggaaggagctatgtgaacgggatgtaatgaactttccagacaccccagtttgcgaaatgccttttttcagaggcgacttgcgagattcaaatcactgcgcgttttctaaatccacctgtatttacctgctatttgagccactcaggtacagttgcatcaggttgatagttatgttcatttgtgttgcgatgataacctgtccgaactcgttaagattttctcaatacacttttctccgctcctacctaacccttcccagctgtgcttattttgattttcttggaacccatacctcacgtttgaaattgacacccgtacatattccaattctcgtcttgcaaaggaaaaataaccgcgcttacccatcagatatgatttatgatacatgtacacttgattttctatttaggaatctctgtttgcataagagctgctcttatgtttggggacaaatacaaagttctcgtcggttttaccgaaaaatagatcacttagcttgatccaatcattaacatccgtactacccattagagtttcaagttcgtctcttccacaccagtttggcggtctctcattcaacttcacagggtatctttcacaaatacccatgggacatacctatgaaaaaaggacatgaactcgcagaagaatctacgacattgagaaatgccgtattcgtcggtgccccagtgttccatagagaactgcgcataatcccttaaaatgtctaatctttccgtacttgtcttgtctagatactgctgcgactcaacctcttcaaaaatccatggtttgatcagggcccctcgagcaaccataacactatcaatattttcatttccgttcaaatagcggtaccagtcttcaaaattgttgacatcaccatttccgacaaattgaattctgttcttggaatccctgccttctttgccttgttcggtttcgatgaaatccgcttcggcggatctcaaggtgtcagccacttgactcacgtagtcccaatccgcagacttagtgtacctttgttgcctagacctaccgtgtaaggtaatcgcagccacatcagtttcgttaaccagtcttttgactaacccttccgcgataggatgaccttcctttgtacctgttctgatcttcaccgtgataggaatatctttcgatacgtagttcatcgcgtttaaacaacgaatcattcttgcagggttatccagcagggcgctaccagaaccttgtctgtatagcaaatcgatggggcagccagagtttaagttgatttcacttatttcactgacggagtttgcgagtgcttctgcagcctttgccgcctgccaggctttagaacaggccacttgaaccccgaacccggggaactctgatgtgtgagctttaggtaacgcccactcagaattagttccttgaattaagggaactgccaaggccatttccgaatatgtcacatctgcacctaactttctcattagacgacggtatggtaaattgcctacggttgtcaatggcgacacgatttttttgtggtacaaatccagtggctttttttcttgagcaaaataacgagtgtccttgtacttcaagtatacttcacgctgtttcattctatgttctgacaattctttgttcctctgttcgacttggggggcaactggttgttccacatctgggtcttgtttcttcagctgtggcgttgactcaacttcttcttctggcttcatggaatctctacattcttgttggaaagagtcgatgatttccaatatttcattactttttgtgaaaggaaatcttctttttataagatcgagttttctttccggtgagatatggtttacctcacctttaacggaccatattgtttgcgcatctggatcaatctccttcttcgatattaggatattatcttctttattcagatgagacgataaaaatctgcatttgaatcccatggggcaaaatcccaacgagttgaagaccggacaggaaggaaatatattactttcaacttcaggcttttttgttgaaaggtacagattgatatcgtgaacaaacctacagttatcaccaaaggagcatttagatatatcgccatggatcaagcgtgggcacaagacattctgttccttgacctgcctgttatctctattcttgttttgcccacgcttcttacctcttccgttcttatttttcttattagtcccacctgcaaactcgtttgtcattctgtcggaagacatctcttcatcatagatggcgaccttctggttttcattctgcttcaatggtacaatatattctggtttgatatgtgcaatacctttggacggggaagtgtcttgtctcttcacggttgagttgtcgtcgccaacaatagagcgtttttcagcgttttgctccatcaataatgtttagaagttgcctttttttcctattctgagttcattaatgtttcattactgctcatctcatcactacacattcgaactaaattcttcataactttaactagatcttatgaaacttttcaaaaatggtgcacgggctttctgtatattgaactttccgtcgcttttcggagctacaattcccctacccggcttgtcggcattaagtctcttcatcccgtgtactattacccgacagtttctgcggcatgttctgtggaacgacggtacgggcggtgactgggtgccaaacagtgcggcgttcccgtgcgcaaggtggtctgcggtaggaaaaagaaacaaaacgcgcctacgtcgtgcaaggggacaggattttgtcagttacataataaggagcaatttcgaatcaattgaaatttggaacaaatgggcgatgcattcgttaaaaggcgattttgtatcaaataacgtcactatcagccattgtcacttgccactgtcgcctgccaccgctattgccattatcatttgctttcgcatcgtcaccgatttaaagctctctaggctaacgtacgcattttacctcccaggccctatctcttttctacctgtcatccctatataacgtcttgtacattctagtggctccgttaacaaggtttgacaaatattacaatcaaagaaggatagcgctagtcaatctaatcattaagttcgcttataaagagaaggaaagctagattttttttctacttcaattacatatcggtgcttctctctggtggttttctgtttttctaatattgatcgattttacggtgagttaaactacttccttttatcgcaatatcatatttagagcgagaaagcaagaagaataaagctaggagaaaaaagcgccacgatacattcatactaagtttataatataccggtcgtcttttggctttctgataccatattatatcctcgaaacactttctctggattcacctactattaatcacctcaagatttcacttgtaaggcgttttcaaatttattgttattaaaagacatattcatattcagtatttttatttttcttcgaaacaggaaaagcttatctgagtatggattttacaacaatgactatggcaagcaatatggctactagtactactacgacggctacatcggcacatgcatctataaattcgtcatcaaactttaatattgatattgattcgaaccagaatactccttccattttgataaataacaattcggattcttctaatggaaaaaacacagattttaacggcgtcaataatattcaccaaaaaaatatcatgaataatacaaataatgttcatttgtactctccaaatataatggaccaaacgctactaactccacaggacattgccaagttacggagagaatcaatagcccattctcaagggatgggtggtgtttcatggggatccattagtgttggttcttggttaagagatgaaattattagccgtagaaatagtattgtacctgcatcagcaaacggtgctgcctccgctgccgcttctgcaaccactactgccactaatactttgcagattcaacaaccaactaagagaccctctgttagtaatccgccttaccatagagggtattctatttctcctcagatagcctacactgcttatctgccaaatctagaaaagcaatattgtaaagattattcatgctgtggtctttccttaccaggtttgcatgatttgctgagacattacgaagaagctcatatatccacgtctcctaacactaccaatatgtcacaaataccgatgaactctgctggtaacactagttcatcagttcgtatgacaaataatacctcttctgccaactataacctgcagaataacatggccgctaatacaaaaaatgcaggtcataagactaatactatgcaggctcatagcagcaatgcaactaataacacctccattaataatatgcatgccaatcttcagagcaacatggattccaactccacaatacgacaatctcagcatcctcaccatcagcagaatataatacaacaacagttgcaatcgaattctgtaaatcatacatcaggggctgtacccacaccgagtgtaatgggttcagcaactgcgtcgtccacaactgcaaatccaaatgtgatatctataacgggtgcccccaactcgggcttatctatggctaatcactctcaacaactacatctgaatggtaatctagtcgatgccgtttcaacgaatgatgtgtttttaagaacgagcaattctccatcaagacacgttccgcacaataaacaaattaacagtaacaataatagtggtatcaatatcaataataatacctcacacaattctaatattaacatgggtagtaaaaacgccatggtgaatcgtccacatacttttaataactattccttgaacaaaacgtccaggaatcctattcaacatcaatcaagaaaaattgatcctcatcaaaccgatttatcacctctggtacttgtccaagatatagatttaagttttatggatgatgatattttgggccctagtaaccacaattccatgaactctgtcgtaaatccaactacaggttctcacaactacaatacttttcattcttccgtacacgcaaaatcttctcaaaacatggtcgaggatcaagacattgatgacattgatgatgacgatgatgttgatgatgacgatgacgatgacgatgacgatgacacagaaaatggctccagttccaatggaaaatcagttcataacaacaattacaagatgcctcagcaagcttatatagacgatcctgcgagaaggctctatgtaatggatcatgaggaacaaaaaccctttaagtgtccagttattggttgtgaaaagacttataaaaaccaaaacggtttgaagtaccataggttgcacggacatcagaatcaaaaattacatgaaaaccctgacggtacatttagcgtaatagatccagattcgacagattcttttggtgatggaatgggctctgcaaaggataaaccataccgttgtgaagtttgtggtaagagatataagaacttgaacggtttaaaatatcacaggggccactccactcactaagatataattgtttctttactgaattgatttagtatgctatttagatactaattctaccgttaccgactcatgcatcgagcggccgctctttctcttgttgttgggcgcaatttatgtgatcatctttgaacgaaaatgcatgataaagctgtgctcttcgactgttaccattaatttcaaaaaataaaaagcatatctattattgaaaaatgaacttataatagaataacattttcttgttttgtcatcatttcctctaaatactccgtcatgaaaacgatttgcgctctgtctggtctctccttttagtattattgttgtgtgttttttactattcattttttactactgtgtttttactatatatattttggctttacttacttccttctgttctgatgtattaaaaactatttttattctaagaaaagaaactttaattcttcttattcatgctctaaatcttaaataaaaggttccgttttttatctgcaattctgtgtatttgtaagtgaattaccatgcacgttgtcggatcgtttttctaggcagaaactatcttattgaaccattaaaagattacttaaatattacaattaatcttacgaagcatattaattagactggaattacagcgcaactatcacaggttaataattggttgagaaaatattatagttttgttagtaatgttgaacttttattttatacacttatgaaagtaaattaattcaatatcaataataatatactataagtaacttaaaaagcaaccttcctcccaaacctacaatccaatcacgctgataagtattatctagaaagttgacaacaccaagccatatggtcaagaaacatttattgagagttattttgtaaataagacttttcgtcatccatataaagcaacctaattgttcatctaatactagagtcgctcttttgaaagttaagtataactacctcatcattagttgctactatgtgtataatttgaaaatctcaacgtaaggttattaaaaatataaatgcgcgtaagacagaaaaatagagacagcttacggcaaattatcaaaatgtgaatccaaggtttcaagaaaataagataaagtgaataggaaggatgaaaatcaatgtatcccgtccattacagtttttacaatggagttcatatattgttgttgcatttctgatacaattgctaatcattcttcctttatcgatcttaatatatcacgatttttacctaagactattacctgccgattcctctaacgtagtcccccttaatacgttcaacattttaaatggcgtacaatttggtacaaaattcttccaatctattaaaagcattccggtaggtacagatctgccgcaaacaatagacaatggcttatcacagttaatccccatgcgtgacaacatggaatacaagctcgatctaaacctacagctttattgccagagcaaaactgaccatttaaatttagacaatttgttaattgatgtttacagaggtccaggcccgctattgggtgctcctggaggaagtaacagcaaagatgaaaaaatctttcacacttctagacctattgtctgcctcgcactgacggattccatgtcgcctcaggagatcgaacaactaggcccatcacgtctagacgtttacgatgaagaatggctaaatacaataagaatagaggacaaaatatcgttagagtcttcatatgaaacaatctcggtgttcttgaaaacggagattgcccaaagaaatctaataatacatccagaaagtgggattaagtttaggatgaattttgagcagggattaagaaacttgatgcttcgaaaaagatttttatcttatattattggcatttcaattttccattgcataatatgtgtacttttttttatcacaggttgcactgcattcatttttgttagaaagggtcaggaaaaatccaagaaacatagctgatagaattgtacttctcgctatataattttaaaacctagctgttattttctaagtaagtaggctcttccagcattctgcttcttcgccctgaataaaaaaaagatgatcagcgaaaaaactcaaaatgaaaataagagatggattcttcaaagttataattcatatgcagaataaagattctaaagaaaatgcacacaatgcatattccatccggtgatgttctgataccgaagccgaagcttattactgaagaaacagatccactgcatataataaagacgaggcaaaagacacatggtcggcccgtgaccattgcaggcccaatggttcggtattccaagttaccattccgtcagttgtgccgagaatataacgttgatatagtttactcccccatgattttggcaagagaatatgtccgtaatgagcatgcaagaatctcagacctttctacaaataatgaggacaccccgctaatcgtccaagtaggtgtaaataacgtggctgatttactaaaatttgtggaaatggttgccccatactgtgatggtattggtattaactgtggttgtcctataaaggaacaaatccgagagggcataggttgcgctctgatatacaattcagatttgttatgcagtatggtccatgctgtgaaagataagtatggcgacaaactaagaattgaaacgaaaataagaatacatgaggcattggacgagacggtggagttatgtagaaagctatgtgatgctggggtagattggattacgattcatggccgaacacgtagaactaggtcatcgcagccggctaacctggatgcgataaaatatatcatcgagaacatcagcgacaaaaatgtgcctgtaatagcgaatggggattgttttaagttatccgatttggaaagaatcaccaaatacactggtgcacatggtgtcatggctgtgcgtgggttgttaagcaatccagcgttatttgctggatatactacctgcccttggggctgcattgagaagttttgttattgggctctagagtttggtggcttgccttttcaattggctcagcaccatctgtactgtatgcttgaaaatatggagttgaagaaatctctgttaaagaaaatgatgaatcttaaaaattacattagtctgatcgactggtttaataaaacctttgagttcaagcgttacggcgaggatggatttggcatgggcgttgaaattccttataaagctaatagctgtgtgcagaggagcgcctcagtggttgagagacaagaatgaataaattttgaattacaaaaatctaataaactgtggtactgaaattgtatatattttcctatcattcaagagcgtatactcgtaccccgaaagcagctctgtttgtgtaataatataacctaaaagaaataaaatgcttataagatggacattatttttttttttttacaatttaagcatcttcttcaacgacaacggtttgtagacccttagcagaggcaaccaaaactggttcgacgtaggaaaacaatgggttcttggcatcttcttcttcgtttctctttctggagattctcaatctcaatctgtattcaacacccttaacacctcttttccagatagcttggttcaattctggggctagacggacatcttcagtacccatgtgtaatttggcgaatttcttgatttccttcacagctcttggagctctctttttgaaactgacaccatgtagctatattaatatcaattcaagattggtctgttagtaaaaaaaaagttgttataagaaggtggaactaaagcatcacgccaaaaacatcggcccaagcgccattatagtgtaaacgtgaggtacggatatcgatcgcagaacacagagaaatgcagtaccgaagaagaaccttccagtccttgcatcacgcattccatataataacctctaatattccgaattaaaacctggggtcaatcattggaaaatgaaatttcacccgtatagatttcgcttggtatttcaccacaatatcgcttgttggctttcaataatttcccacgtaaagacaacgctaatttcgacatactcttttgtgcaagttgatggtgtattcacgagtgacaacgtcttttaaaccggccattttcaagtactttggattatctgctcgtgcaattgaaatatactaagacccaagactatgtaaaactaaggaacctatcaacaatgagactggtcaaataatagagtaaacatgtacatgaagcactaccatcagaaagagcttacaaggttacgaaacaacgtcagtgccctctgtcgcattaccctcggtttcgcgcccttccagttggcatttgaagtgccaatccaattgtgagcacatccaactagcgtgcccttgcaatcccagaggacaccatacaacttccagcctagtagtgaacttaccaggcgaggagcgcgggcgccagagggcagctcatctgcgttccggctctaacgagaagggcggaaatggcaccatcacctgaaaaagaacgtaatctaggctgagccgcgcctttaagtttttgtcgcatctggctgcgcttcatttaaacggcactcctaaaaaattgtatgaggtgattttttttgtgtacagatgtacggatgtacggatgtacggatgtatactatgtaataatgcacggatgtagagaaacagaaacgaggataataaaatcggtttttgtatcatctggcggcgatatggcgcaaggctttaagtaaacgtcctatatggtactaacggggttttattccgaatcaaaagaaaaagagatacgaagtctctcttagtaaaaaagtctttatggaagattatcgataattcgataattctaccgacaacagtggttttgtttggctcagcaaacgtgcagcaccatgatcttggtagatttcttctttaccctcaccttccccacaccatgtttgcttgctacccgtgtgtaatgctatcagcgcgcgtttctttttttttcttgctaacatttttcaactttaaaatgaaacgatgcatgagtgatagaggcattgaactttagtaaacaatagaaataaccatcggagttattatttttttctgcttattctttggtcgcaaaaaagtgtgttgtataattctttggaatatttataaaaacagggaatactctaacaacaaacgctagtgcttagctactcttccgctggtacttcaatatagcttgtcacatatttttgtccattaaggtcgttaaaacccgaataattttgtacgatcagtttagtaaaagaaatacagtattcaaaagctaacggtttattatgactgtttctacttccaagaccccaaaaaagaatattaagtataccttaacacatactttacaaaaatggaaagaaactttaaagaaaattacccacgaaacgttgagtagtatcgatgactctagtggaagcgatgaaaaaatagaggctctgtttactgtgtctcagcctgccgtcgtagcctccaagggtatagacagagatagtggtgcttctatgtcgcaggtaggaggaggtgtcaatagtacattggagatgaagctcacagatgagagtgaggaatctagctctgctaataacacgaccacaaccgcctcgcatactctatcgaattcgaagaagtctacgcagaactttgaaaactataacgtagtggaggaacgcataaaattagcacagaaaagtaaggcgccgttttgtaacgctgagaaaatctggaaacgaagaagacaactctggacacaacccactgagcaaagtgaaagcgccaataatgacggagttactcgaagggagattttccaagctatacctcaggaatattatgctcgagtttacaagaaactggtggtagatgataagccattgagagagcctctaaatctggaagatgctttacaagtcataaatgcaggctggacggaaacgagaaagtgggctaatgctgccaaggcatgccatgactgagtgtcgacgtcctttttgttttgccttatagcatcttttcctttcttcaaatttgcattacacaactttaactcagttaaagaacttcgtcatttacttattcttcttttttttcttacccttctttctcaaatcttatttctgtataaaatacgtattgattcattccattaataataacatataataatagtactaatttaaaaacattgaatatatttatcgttttatttcgagttgcgattcttttctatcagttggtacgtcatttcaaggattcggagatccctatccacaagctctgcttccttttgtaatgcttcggtatgccccatatacggagtgtacttttccaacatatagttaataggagaaacacacttatttttaaatgagtcgtcatgaagtcgcaataacttcttcaactgtacatttaaaatatatgattgattattttcaatttcttgcaaagtcttcgaggcttctgttctatgcggagagttgattattttgtcgagtaatcggtcaagttcttcagacctgtttggcatttttacgattatccagttcacacacattgagaatgtaaggaacatttatttattgtcgatcatttattaaatgtgggagggaccctttaagaacactgcaacaaacccaataaataattcttggttaccctctcaaaaaacatcataggaaaaagaaaaatatacaatctgcctttgttactaatatacttgttctatataatgctcacgcggtggtcacaaaagctgccactcccatgcaaaacttcacaagatcatctaatctgtcttccttcttatgtacatcctcccaattttgaagagcagaggcaatatcttgattcttgttgttagcatgaataacatcaccgtgtgccttaaacagtaagctcataaacgtttcataaagttcgaaatttttattgctcttcaacccctgtgttaacgcgtcgataaaccacacaatttcatcaaatggctcaaaggaattcaatgatcttatctccaaatccactgcagcaggtgagaaatttattagagtggccagcaatgatgaatagtccttggattgtgagccctctcgtaattgctttgtgaaatgtgattcaaaccctaatcttcctgtaactttgaatttattcatttgctcttctgcatctaacttcttttgtgcttcttgatctctgcgatggatttcttctggtgtttcatgtgctatgccttctctgacagaggcttcatccccaaccttttccccagatagttgcaagaaaaatggaagcttttctgatttctttggagcttcctttggcttagaacgttttctgataacatctaaatgaagcaatgtgttcattttacttctaggtcctattgataaagtcaacagctccttatcaatctgttccaatgatgtataagtgttgaaatcaatatcatttaggtcttctcctccattgctttctaaagcccctgataacatcgagtcgttccctcgaacagatgtgctaggtaacgccattcttgcaaattcagactcatcgatggttcttgtcgatactgtcttaaattgtgctctgttcgtccagatgcatataccattaccagtaacatgggtagtggcaagcaagtcaccattcggagaaaactttacattcgtagcgacattatctactatgataccatcgatacatcctccggttggaagatcccacgttctaatggtggaatctagagaagcggaaacaatccaacggccctcaggtgagaaatcaaatgcagttattctattactatgaccccataattgacgaacaactctttgagtaactgcgtcaataacaacaattgataagtcgtctaaagccaatgcaaatagatcggaagaacgatgataaaccattgcggtaataggtgcatccaatttcaattttcccaacaaggttgacttgttaaagtcataaaaaccaacaataccgtctagtccacaagaaaccattttacgattcataccatctaaggatataccggtgactgctcttttgtgcaatttgtattttttacggagtataccactttgcatattatagatggtgatagagccgttagaagaaccgatgaatccaaaattaccacattgcgacatggccacagatttaacaaatccatcatcagtagtatcaaaagtccacctgccaactcttttatttcgcatatcccaggttcttgcaaacttttcatctttatgtgcagtgataatgttttcccattcacctattctggcattttcaattgcaagagccactatttcaggaaatttagacttaattgtactaccacctaccctgccgccatcttgtttcttgtgtaacctttgtgacatttcttgcgactgtgcatctttacgcagagaaaagctccataatgatctatctttggatgctgatagcatgaagtgtgattgcgaatcagcaaacgcaatgtatgaaggtggttgagaatgaccccctctggaacgtagatatcttggcggttgaacaactacatcaccgcttccttgagataatgacggatcgaaaacgtactccttcagggaattgtcaccacctgatgtaacaataatgggttgaccatttaaaaaagtagcctgagtgacaccaccgtacgattctctatgaatgttcttcaaaacgtgtattcttgaacggcgatctaaatcataaaatattagatcaccactgctcgttcccacactcaaatgagaagaaccgtcggttctgaaactcaatgaggagattcttgattgcggaatcttaattgtgcggatccttttaccttttctcatattaaacataataacctcaccggtcacggtacctagagcaataatatccaggactggagcgggttcagcagttgtgatttggtctggaaattcgtttgatgtgaatacaagcttcccggttctgacgttaaaaagtaaaacgttagatttggtaacgacagttaatttattcaaataagttgccaaatgttgtaaagacacaatttcgccaccttgaatttcagtaacggtaagtttagtgtagaattctgatggatatttatcttgcggatcggacttcttgtatataaagatggaattgtcgtcggtggaagcgcaaagataatctccgaatatgcacaaatgttcgacatttgcatcagtttctagctcaagcaaatgttcctcaatacccctcttgtaaataccaaccttgttttcatatgctgcgtagacgtagtgaaagtgtgctgataatgctacaattgaggatggtgtttctttctcggaaacaaaaagtaaatgtaaggtattcgcatcatatatctgaaatgttttaccaacacacgttacaatgtaaaaggtagatcccaatgtaccagtagcaaaaggaacaccattgctaacattaccaataatccggaaaggggaaaatatcttagaatttttccctctacttcttacgtcttcttcgacttttctttttttcaagtcgatagacataatgtactattcctaactcgctatagccttttcagtgtcttattccttgctgctgtttcgctgtatatttattgtgcttaggacttattaaatttcattagcaatctcatcgcgaaatttttctcaaaatttttcagttaaaaaaaaaaaagcacgtgctcaaaaatgtttttagaaaatcatttatttaagataggaaaaatgcaattaatcattgaatcaatatgttcaccacttaaattacccactgagcatttcatacaaattcaaaagcatctcgtagcatattaatatattgcagaaggtcatgagtgggataaagaaggaaccgattgaatctgatgaggttcctcaacaagagacaaaaaataacttacctagtgcaccttctgagatgtcaccccttttcctaaacaaaaacacacagaaggctatgcaatctattgcaccaatattggagggtttcagtcctaagacgtcagctagcgaaaatatgtctttgaaattgccacctcccggtattcaagatgatcacagtgaagagaatctcaccgtgcatgatactctgcaaagaaccataagcactgcactaggaaacggaaacaacaccaatacagttacaacttccggtttaaaaaaggcagacagtgaatcaaagtcagaagctgatcctgaggggctcagcaattctaacatagtcaatgatgcagataacataaattccatctccaagaccggatcgccccatttacctcaaggaacaatggacgctgagcagactaacatgggaactaactctgtacctacttcatcagcttcttcacgcaaatcctcgactagtcatcccaaacctaggctacccaaggtagggaagattggggtatgtgcaatggatgcaaaagtcctttcaaagccaatgagacacattttgaatcgtttaattgaacatggtgaatttgaaactgtcatttttggagataaggtgattctagatgaaagaatagagaattggccaacttgcgactttttgatatctttcttttcttcaggatttcccctagataaagcaattaaatacgtcaagttacgcaagcctttcattatcaatgatttaataatgcaaaagattttgtgggacaggagattatgtctacaagtattagaagcctacaacgttccaacacctcctagactggaaatcagtagagatggtggtccccgtgccaacgaagaattaagggcaaaattacgtgagcatggcgtagaagttaaacccgttgaagaaccggaatggaaaatggttgatgatgatactttagaagttgatgggaaaaccatgactaagccctttgttgaaaagcccgttgatggtgaagaccacaacatttatatatactatcattctaagaacggaggaggcggtcgtcgtctattccgtaaagttggtaacaagtcttctgagtttgatcctactttggttcatcctcgtacggaggggtcttacatttatgagcagtttatggataccgataatttcgaagatgtgaaggcttatacgattggtgagaacttttgtcacgctgaaactaggaaatcacctgtggttgatggtatagttagaagaaatactcatggtaaagaagttagatatattactgagttatcagacgaagagaaaaccattgctgggaaagtttccaaagctttttcacaaatgatctgtggtttcgatttgcttcgcgtttctggtaaaagttacgtcattgatgttaacggattttcttttgtaaaggataacaaagcttactatgattcatgcgccaatatattgagaagtaccttcattgaagccaaaaagaagatggatatggaaaagaagaatctgcccattattcgtgaagaaaaggaacaaaagtgggtattcaaaggactggctatcattatccgtcacgcggacagaacaccaaaacagaaattcaaacattcattcacttcgcctatttttatatcgttactaaaaggtcacaaagaagaagttgtcattcggaatgtaaatgatttaaagattgttcttcaggccttaagaattgcgttagatgaaaaagcaggaaatccagctaaaattaaagtgttagcaaacgctctagaaaagaaactgaattttcccggtacgaaaatacaattgaaaccggttttaaataaagagaacgaagtggaaaaagttcagtttattttgaaatggggtggtgaacccactcattctgccaaatatcaggctacggaactcggagagcaaatgagacaagattttgacctattgaataagagcattctacaaaacatcaagatattttcatcgtctgagagacgtgttcttcatacggcgcagtactggaccagagctctttttggggccgatgaattaggtagcgatgaaatcagtattagaaaggatcttttagatgacagtaatgccgccaaagatttaatggataaggtgaaaaagaagttgaagccacttttaagagagggtaaggaagctcccccacaatttgcctggccttcaaagatgccggagccatatttagtcataaagcgagtggttgaattgatgaattaccataaaaaaattatggataacaactttgctaaaaaggatgtcaactcgatgcaaacaagatggtgtacttctgaagatcctagtttgtttaaggaaaggtgggataaacttttcaaagaattcaataatgctgaaaaagtcgatccttctaaaatttctgaattgtatgatactatgaagtatgatgctcttcacaacaggcagttcctagagaacatatttgacccgggtcttccaaatgaagctatcgccgatgaactcggcagtcattctttagttgaccgatacccaattaacgttctcgccaaaaataattttaagataatagacagtcatagcatgaacaattctggaaagaacagtagtaatagtgttgggtcgttaggatgggttctggaaagcggaaaaacatctacagcaagaaaccccaaatcttcttctcaattcgatgagccacgctttatgcagttgcgggagctgtataagctggccaaagtattgtttgattttatctgccccaaagaatatggtatttcagatgcagagaaactggatatcggtttgttaacttcgttgcctttggcaaagcaaatactaaatgatataggagacatgaaaaatagagaaactccagcttgtgttgcgtacttcaccaaagagtcccatatttacactctattgaatatcatatacgaatctggtattccaatgagaatcgctagaaatgctttaccagaactagactacttgtcgcagatcacttttgaactttatgagagtacggatgcttctggtcaaaaatcgcattccattagactaaaaatgtctcctgggtgtcatactcaagatccgttagatgttcaattagatgacaggcattatattagttgtattccaaagatttccctgacgaagcatttggatatggactatgttcaacagaaattgagaaacaaatttaccagggtcattatgcctccgaaatttacaccagtaaacattacgagccccaacttgagtttccagaaacgcaaaaccagaagaaagtcggtatctgttgagaagttgaaacgtcctgcctcgtccggatcttcatcatctacctccgttaacaagacattagattagtgatcacacccaatttttaatttagtaacccaaaactaaataagtatttactcaacttttttttaaaaaaaaaaaacttaattgaattttgctcgcgatctttaggtccggagttttcgttgaacccttagacgagcaaattagcgccataaggatatgcgtcagagcacattaattagtgacatatacctatataaagagcaaccttcttgttggaataaaaatcaactatcatctactaactagtatttacgttactagtatattatcatatacggtgttagaagatgacgcaaatgatgagaaatagtcatctaaattagtggaagctgaaacgcaaggattgataatgtaataggatcaatgaatattaacatataaaatgatgataataatatttatagaattgtgtagaattgcagattcccttttatggattcctaaatcctcgaggagaacttctagtatatctacatacctaatattattgccttattaaaaatggaatcccaacaattacatcaaaatccacattctcttcatggtagcgcctatgcttcggttacttctaaggaagtcccatcaaatcaagatccgttagccgtttcagcttccaatttaccggaatttgatagagattccactaaggttaattctcaacaagagacaacacctgggacatcagctgttccagagaaccatcatcatgtctctcctcaacctgcttcagtaccacctccacagaatggacagtaccaacagcacggcatgatgaccccaaacaaagctatggcctctaactgggcacattaccaacaaccatctatgatgacgtgttcacattatcaaacgtcacctgcgtattatcaaccggacccacactatccgttgccacagtatatcccaccactgagtacttcctcacctgatccaatcgatttaaaaaatcaacactctgaaatacctcaagctaagacaaaggtgggaaataacgtcttaccaccacacactttaacatcagaagaaaacttttctacatgggttaaattttacatcagatttttgaagaactctaatctcggtgacatcattccaaatgaccagggtgaaatcaaaagacaaatgacttatgaagaacatgcgtatatatacaataccttccaagcatttgccccatttcatttattgccaacatgggtaaaacaaattttagaaattaattatgctgacatccttacagtcctttgtaaaagtgtgtccaaaatgcaaactaacaatcaagaattaaaggattggatagctcttgccaaccttgagtacgacggaagtacatctgctgatacatttgaaattacagtcagtacgatcattcagaggctaaaagaaaacaatatcaatgttagcgacagattggcctgtcaactaatacttaaaggtctatccggtgacttcaaatacctacgtaatcaatatcgtaccaaaacgaacatgaaactttcccaattattcgctgaaattcaattaatatatgacgaaaataaaatcatgaatctaaataaaccgtcccaatacaaacaacacagcgaatacaaaaatgtttctcgcacatctccaaacacgactaacacaaaggttacaactcgtaattatcatagaacaaatagttcaaaaccaagagcagcaaaagctcacaatattgctacatctagtaaattctcaagggtgaacaatgatcacattaatgaatcaaccgtttcatcacaatacttaagcgatgacaacgaacttagtcttaggccagcaacagaaagaatctaagccaacacacacaatagactcgaatgacgaactacctgatcaccttcttattgattcaggagcttcgcaaacgcttgtcagatcagcccattatttacaccatgcaacacccaattctgaaataaacatagtcgatgctcaaaaacaagacattcctataaatgccattggtaatcttcacttcaactttcagaacggcaccaaaacatcaataaaagcactacacacaccaaacatagcctatgatctattaagtttgagtgagctggctaaccaaaatattactgcctgctttaccagaaacactttagaaagatcggatggtacagtactagctcccatagtcaaacatggagacttttactggttatctaaaaaatacctaattccttcgcacatttcaaagctaacaataaacaacgtcaacaaaagcaaaagcgtaaataaatatccatatccgttaatacatcgaatgcttggacatgctaacttccgaagtattcagaagtctcttaagaagaatgcagttacatatttgaaggaatcggatattgaatggtctaacgctagcacatatcaatgtcctgactgtctaatcggcaaaagcacgaaacatagacatgtcaaaggatcacgactaaagtaccaagaatcatatgagccttttcagtacttgcataccgatatatttggtcctgtacatcacttaccgaaaagtgcaccttcttactttatatcgtttacagatgagaaaaccagattccaatgggtgtacccattacacgaccgtcgtgaagaatctatcctcaatgtttttacatcgatattagcatttattaagaaccaattcaatgctcgcgttctagttatccagatggatcgtggctccgagtacactaacaaaactcttcataagttctttacgaacagaggtattactgcatgctatacaaccacggcagattctagagcacacggtgtcgctgaacgattaaatcgtactttattaaacgattgtcgcacactgcttcattgcagtggtctaccaaatcatctatggttctcagcagtcgaattttctactataatcagaaattcattagtctcaccaaaaaacgataaatctgcaagacaacatgcaggtttagctggactggacattactactatactacctttcggtcaaccggttatagttaacaaccataatcccgactcgaaaatacatcctcgtggcattccaggttacgccttacatccgtcacgaaactcttatggctatattatctatcttccatcattaaaaaagacagtagatactaccaattacgttatattacaagacaaccaatccaaattggaccaattcaattatgatacactcacctttgatgatgatctcaatcgtttaacagcccataaccaatcttttattgaacaaaatgaaacagagcagtcatatgatcaaaatacagaatctgatcatgactatcaatcggagattgaaataaactctgatcctctagtgaacgacttctcgtcccaatcaatgaaccccttacaattagaccacgaaccagtccaaaaagtacgtgcaccaaaagaagttgatgccgacatatctgaatacaatattcttccatctcctgtacgatctcgtacaccccatatcattaataaagagagtaccgaaatgggtggtaccattgaatcagatactacttcacctagacactcgtctaccttcactgcacgaaaccaaaagcgacctggtagtcccaatgatatgattgatttgacctcacaggatagagttaattatggacttgaaaacatcaaaactacacgtttgggtggtacggaggaaccatatattcaacgaaatagtgatacaaatatcaaatacaggactacaaatagtacgccctcaatagatgaccgttcgtccaacagtgaatccactactcccatcatctccatagaaacaaaggctgtatgtgataatacaccctccattgatacggatccgccagaatatcgatcttctgaccatgcgactcctaatataatgcctgacaaatcctcaaaaaatgttacggctgattctattcttgacgacctcccacttcctgacttaacccataaatctcctacggacacttctgatgtttcaaaagatattccacacatacactctcgtcagactaattccagtttgggtggtatggatgattctaatgttctgactactaccaaaagtaagaaaagatcattagaagataatgaaactgaaattgaggtatcccgagacacatggaataataagaatatgagaagtctggaaccaccaagatcgaagaaacgcataaatttaattgcagcaataaaaggagtgaaatcgatcaaaccagttcgaacgaccttaagatatgatgaagcaattacatataataaagacaacaaagaaaaagacagatatgttgaagcttatcataaagaaattagccaactattgaaaatgaacacttgggatacaaacaaatattatgatagaaatgacatagatcctaaaaaagtaataaactcaatgtttatatttaacaagaaacgtgatggtacacacaaagctagatttgttgcaagaggcgacattcaacaccccgatacatatgattctgatatgcaatccaataccgtacatcactatgcactgatgacgtcactgtcaatcgcattagacaacgactattatatcacacagctggacatatcctctgcttacttatatgctgatatcaaagaagaattatacataagacctccaccacatttaggtttgaatgataaattactacgtttgagaaaatcactctatggtttgaaacaaagtggtgcaaactggtatgaaaccattaaatcatatttaataaattgttgcgacatgcaagaagttcgcggatggtcatgcgtatttaagaatagtcaagtaacaatttgcttattcgttgatgatatgatattattcagcaaagacttaaatgcaaataagaaaatcataacaacactcaagaaacaatacgatacaaagataataaatctgggtgaaagagataacgaaattcagtacgacatacttggattagagatcaaatatcaaagaagcaagtacatgaaattaggtatggaaaaatccttgacagaaaaattacccaaactaaacgtacctttgaacccaaaaggaaagaaacttagagctccaggtcaaccaggtcattatatagaccaggatgaactagaaatagatgaagatgaatacaaagagaaggtacatgaaatgcaaaagttgattggtctagcttcatatgttggatataaatttagatttgacttactatactacatcaacacacttgctcaacatatactattcccctctagacaagttttagacatgacatatgagttaatacaattcatgtgggacactagagataaacaattaatatggcacaaaaacaaacctaccaagccagataataaactagtcgcaataagcgatgcttcatatggtaaccaaccatattacaagtcacaaattggtaacattttcctactcaacggaaaagtgattggaggaaagtcgacaaaggcttcgttaacatgcacttcaactacagaagcagaaatacacgcagtcagtgaagctataccgctattgaataacctcagtcaccttgtgcaagaacttaacaagaaaccaattattaaaggcttacttactgatagtagatcaacgatcagtataattaagtctacaaatgaagagaaatttagaaacagattttttggcacaaaggcaatgagacttagagatgaagtatcaggtaataatttatacgtatactacatcgagaccaagaagaacattgctgatgtgatgacaaaacctcttccgataaaaacatttaaactattaacaaacaaatggattcattagatctattacattatgggtggtatgttggaataaaaatcaactatcatctactaactagtatttacgttactagtatattatcatatacggtgttagaagatgacgcaaatgatgagaaatagtcatctaaattagtggaagctgaaacgcaaggattgataatgtaataggatcaatgaatattaacatataaaatgatgataataatatttatagaattgtgtagaattgcagattcccttttatggattcctaaatcctcgaggagaacttctagtatatctacatacctaatattattgccttattaaaaatggaatcccaacaattacatcaaaatccacattctcttcacttctccgatagacttgtaatttatcttatttcatttcctaacactttgatcgaagaagagggataacaacagacgaaaacacatttaagggctatacaaagatgaatatgggaggcagtagcagcactgctgccaaaaaagcgacttgtaaaatatcgatgttatggaattggtataccattgacacctgcttcattgccagatcttggagaaatgacaccaaaggaaaatttgctggttcttgcatcggctgttttgcgcttgtggtggtagctcaatggcttactcgtttttcaaggcaatttgacgtagagctattaaaaagacagaaaataaagcatttagctagttactcgccagaggagtacgttgtcaaatgtggagaagaggatgctaaatctgatatagaagaactacaaggcttttacaacgaaccaagctggaaaacaactttaatttccttacaaaaaagtttcatttatagtttttacgtttggggtccaaggagattgaacgagccagaagacgacctgttaaagaaggtcctatcatgctgtacattaataacgccagtggatttgtacccaacttttttggatcacatgataagagttactattttcgtattacagtgggggttatcttatatcatcatgctgctgttcatgtactataacggctatatcattattagttgtttaataggtgctatcgttggtcgtttcatattttgctatgaacctctaggctcattgggtgctaatggatcagcccagggtacagtgagttatgataaagagagtgatgatcgcaaatgctgcttgtagaaagacaaaaatgaatagaggaaagccgagaggtttgtttcaaaaattgacgccttcctcatttttttcataattagctggtaaaagttactatttgtaacgactgctaaataacaaataattattcgtgtaaaaataaatagctaataccaccaggtgttcatattccatgactgcatatttgggaaacgagacggtttgaacatccttagttgatgtaaaactataataaaagctctatgggaagtaaactatctgcgggtcgggtaaggaatgatgcttgctcgacgtgtagcgatgaaaaaagtgaaaacttatttgaactctagaaaactgctaagatcctgaactgataccgaagttaatgaccttgaccggtcttctgctgtatggattttaaagcaagtgggacaaagtttaagaaaactggcaagaaggtagtgcctgctaaagcgtttgaagaaattgttcagacaaatagagatgttctgaaaaaatcagcattcctctcagatttacttgaaaatttacaaccgcacctcaataacattaagaaaatacgatgtgttgcaattggaaatttcaaggaggattttcctgcgacgtaccaattcgctcttctcctagagattactgattatataaaaagtgaggatgaaagggatgtcgttgtttccctgtatgatccaatatttactaaagaagagatacagtacttgaaaagtttaggaagcaaatggctgatagaggaagaattttcagagaacgatgcaattgattatgaatcggtattatatttccttccccatgctcctttggatttaactgagaacatactatcgtcacagcgaccacacttatggctggcaaataatatgatatcacacaccgatagatacaccaaagcaaaactttgtgaaaactatcctaatttaagcaagctagttcattacttgcagactaacgctccgccagaagttaaaaaagcacatgatgtagatggttttgcaacattcattccaaagagaaaaagaaaaaacagaaacaactcctctaaactcaaggtcacaccatctgatatagactatgattcaatagcaccgaagtttaagtcctgccaaatactcaccgattttgatgaaggaaagtatttgaaggaaaaaccctggatcaattccttctctgacttgacgttacatgctatagagtactaacatatcattcactacatagtactttataactaaactgtaactttcagggcatcgtaacctgacgctttaccatcaataacgacacgagaccgctttatctatgatactggaacaatcaacatgattgttataaatgtactcgacaggatcatgaaaggataccaacttagttgccggttcattgaaatggaaagctcaagaacgtatactgaaagagagcgacgtctactttgcccacaaaaatctactctctgaattgaatagtatttagagattgcataattcaagccctcctcgaggaaaggatataaatgaaaataccgtttttcctgctgatggttatcgtccctgtcaaggatacttctcggactcgaacaacgttacagctcaacttaaagaaggctaaatacgacaagggcgcttgccctaagaggaactgtttctaagttctaacgagtgcctgcgaagatcggttttttttaacttcgcgggcgaattgataaataaagttcttcttgcaattttttaagatcaaggttggggcaaaaaggacgcaaacgaatggttgggttaagaaagtggaaagacccaaacctgaagttcatttagttcttggcggaatgaatcattcgaacggcgcaatacgctcgtcaaagaaggaggtatgatttatgacggtttgtgggtagccctctaaacacgtggagagtaaccttttctgtttagcgatcctagaactgcgaacaatggtagctattcgcttactcaacaatattgttcttgattaatgcattcaaatatgtaacttcgtccctcatataagcgtctgacgcgtcgtgaaaatttaccctctcaagaaaatacaagagattacgtaaaattagaaaccaaaagatatgagtggaacagacacatatcacccatatttccttttcacgtaagaaaacttaagtactagtgcggtgcctgcgttagtgcttgtctttaggtcaaacaggtcatcttgaccaacttagcttataataagaatgataatcgattactctaaatagcattctttcatttgcggcatcttataacccacacaccgcatttaggacccgttttttttctttttttttttgttgaaaaaattcaacagttcctatttttttcttttcattctttttttttgccttgccttcgtttcgagaattctttttctttttctttaggtaagggaccttctcagctgaggcacggtggggtttgtaatagtgtccattctggcacaaatgcataagtgatgctaaaatagtgatacgtctaaacaaaacggtttggatgcctagcaaatagtaaaaagacttgaatatatcacttttatcactatgtaaaaaaactgagttatattattaagttttttttgaaatgttcccgtttgacgtgtatttagtacagtatgttccgtggatactgtttaggtgcatttaagcgctccagaactctcctttaaattcctgcagcactccgtcagttgcttcgtaaatccgcctggataccgccttgaagattaaagttcccctcagtactcgtttagcttgaatccaccgcattatggcctggtaaattccctagttgcttttttctatacggcgtcgtccctggaaaaaaaaaacttgcctacagatcttagtagacaaatttaactacgtcaatctattgttctgcttaaaaaaaaagttgaaattgttaaatcctcaacaaacttatcgcttttcaagctgctgcaatcatagatcttacacttctacacagaatttttttttcctgtaaaaagaacgacaaaatatataaacctttgacaatctagctgcatttactcacattaagccttgagattttcatttacttcataatagcttgtagatgcgatgctgatacagtaaaataaaaattcagtaatacagtcaaattattgcgatgaattttaaaatactcctcccgatttgtgctttattgacacttacaacatttctgttgaccattattgcaactgcgggttctacctcaaattataagccaataacgaacatttatatcggtgatgctgatatatcaaaaatcaacgttacaaaagttatgccacaagttggcccaattttgactgtgttaggttctgctctaaccgctccaaatacaacggtggataccatcttcggcgctcttaaggcaatcgcttctaccgaagccttgtctcctttactgcacttgttgtctaatgctgctaacacttcagccacattatcatctttgacacagttggctccaatggctttgctaggaaccaataccgctactaccacgaccttctccgctcttgatgagttattgactacctctaaaaacacaaccgaactcttggatgggtttagcacattgatgtcatctatgtcaaccaacacttcttctacttcggcttccttagaaaatactgttctaaccctattagtggattcgaccaatcctataggcactactgagtctttgatcactttaaataatatgaccacagaagaaaagacaaaattgtcgcctgtattcgagttattcgcaagttccaagaacattactgccacatgcgatgcgttagaaaccataatgaactctaccattccaacttcaacggtctcctcattgttttctagtctaaaaaccagtcttgcggaaggtggcaatgctactgaaactattatgcaattaggctccctcgttccttcgagtttaaaaccagctgtccaagctgttgttactctgtttgatgaaactacatctcaaaatgtaacattatccgtattgagcactatgattgccgaaaacattacccaatcatcttccgctaaagctgccatgggtgctttgactgacttgttgaattacactacaaaccaaacagagctgctaacatctgtcgaaagtttggccctctctaaagaagccgcttcctctactaaccaattggtggcacttgatgaaatcctttctgcaagtgctaacgcatccacagttgtttccataatccctactttggaatcccaattggccaataacaccgtattacttaagtacgttccatacttgttcagcctattagctgcgtcaagcgaccccgtgtcaagtttctcttctctggttaatatcaccaaatgggcagaaactaatgccgctacatttatgcccatgttgaaaattttaaactctgctgtaaacatgacaactatcacaccagaacaactcaaggaaatgactccttctatccttgaatatctacacatccctgtcatataccgtttgtccattttcacaatgtgtcgtgctcacttaaacagaacaatgtactcgtgtagcaagtcacacgctgttcaaaacatggatttccggtcgattgtttacaacaacattgaaggctcggactttaaaccttatatggatgccctgaacatcggtaaggacgatttgcatttagatggtgaattacaagacagacaacacatgtatgtcccagcagtgaaagcagctttagctatgaacttaatgtgcataatcacatccttcttcttaatggtattcttgttgctactaagtagacgttccgtggtgagtcaaaaattatggttggcattgggctttatttcctgttggatatgtattttcagcgggttgggaagcacaatctttagcgtcatccttaatatgatgaaatccggctccaagaaggacaattacgatgtcattatttctggctcttctccattttatggcctaatgtggtctggatttgtatttgccgtccttgtatttctctgcattgcatactgctggtggagcagcagaaagggagctgccatcgtggaagctgagaaagctgttcaagaaagtgactctactacctcaagaatcattgaagaacacgaaagccccattgatgctgaaaaaaactttgcaaggtaaaataataaaaagaagatcatgcaacatcaccccgtaaattttttcaattctccatccttttaattttcttcattataattttctgaattgtatatagacaatatattttaatcatatttaatatgaaacggaacacaaaaattaattaataaccttgcctttttcaaattcaaatcaatggtttttcctcaattggagcgttcgcatagatgacggtgggcctcgatctcacgctacaccatagaatgaaattcagtaatgctccaacgacagccccccacatcaaaccctggtagttcctaccaatgctcattgaaataccgtaatcactatagttatgctttaggatgtatttgatgtatgagtaagtgcccaaacacgaacctatactgactaatagggcggcaaaggcgaaaaatgaaaaaaaggcaccaaaccacgttagcggccttatgtggatgatccagcgcaatacgttgaacactagattcacaaaggtcaagacaataccaataagaatggtaatgaacatacacttgaccaaattgttgtagtatgtcattttactttttagtttttcgggcaaaacaacactggccacggaatccataagctccagagcctcattgttgttgatattgtcatacactaatgacgataggttaaaattctggataccgtgaggcgaagaacatgattggatgttatgcgaggagtccactgtacagtacgaccaaagccctatatttatatatgagggcaggcccaacgaagatagcgtagcagaactcaaagaagggagcaccgtcgataccttcatctgcgacagatccaattctgcacagtaaattttatttatgggactgtaatttttcgttgatcctgcgcatgcaacaatggctaatataagtgctcctagcgaaaatatagctgcaaaaaataacgtgaaaaaattcctcatgcttatagcgtccttcgatgatgtgtttgtttttttcttaatagttctctattgctttaatcaagtttcactactgcgcagcgttgtatgatcttgatctagtttcttttagttctacttccaaacaactggtccagaatgaaacaccactggacactcattgactactgagacatggaagagcaacattctcgcgtatatatacttctcagccaattttcctgcgagaagcgctaaaaataccgagctgggcttggctgatagtacgcccgatttggaaataacgctcgaggcgtgctgcgtccttttttgcctggccaggccaggccgggttgtcccgcaccattcaacggcggctatctggcgatgttgaaagagggggggagtggagagggctctgagggtcaagtgggaggctgtgacagttctcataagctgggcactgagatacatggaaagaaataggctgttcacagtgtacgtcaatgtgtggctgactaaccgttagcggggcggaaccgacatgtctggtgcagtgtatgtaagaaaaaaagaatgacaatgcatggccaaacttttgatctgtgacgttcgcaaaacgcactactttgctttctgtatgcaatgggaatgaggcgtagcgacatattaagaagccttttccatgtgaggaagcttcgccttgttttccagacgcgctttttttaggatcaacgaagaggaaaaagggtttcacatgtttcatctggaaaagatggagactgaaaaacaaaaaagcagagaaaaggtcatccaagatagaataggggacctcggctaggaatcaggaagtgtgttttgaaagtcattctttttttttcaaaagatggagtactggcattatgtggaaactacgtcatcgggccaacctcttcttcgagaaggtgaaaaagatatctttatcgatcagtccgtaggtctttaccatggcaaatctaagattctacagcgacagaggggcagaatctttttaacgtcacaaagaattatctacatcgacgatgcaaagcccactcagaactcgcttgggttggaattggacgatctagcgtatgtaaactattcatctggcttcttgaccagatcacctcgtctgatcctgtttttcaaggacccctccagtaaggatgaacttggtaaaagtgcggaaacagcaagtgccgacgttgtttcgacgtgggtctgccccatctgtatggtttcgaacgaaacgcagggggaattcactaaagacactctacctacacccatttgtatcaattgcggtgtgccagcggactatgagctcaccaagtcgtctataaattgttctaatgcaatcgacccgaacgccaacccacagaatcagttcggagtgaactctgagaacatttgccccgcctgtacttttgctaatcatcctcaaataggaaattgcgagatttgcggccacagattgcctaatgcatccaaagtacgatcaaagctgaacaggctaaactttcatgattctagggtccatattgagctagaaaaaaattcactggctagaaacaagagctcgcactcggcattatcgtcctcgtcctcgacaggatcatcgacagaattcgtgcaattgagtttccgcaaatctgatggcgtattgttttcacaagctacagagagggctttggagaatatactcactgaaaagaataagcatattttcaatcagaatgtggtttctgtaaatggtgtagacatgaggaaaggggctagttctcacgaatacaacaatgaggtgccatttattgagactaaattgagcagaattggcatatcaagcttggaaaaatctagagaaaaccagcttttgaacaatgacattctctttaacaatgcgttgaccgacctaaacaagctaatgtcgctggctaccagcatcgaaagactatacaaaaatagcaacataacgatgaaaaccaagacattgaacttacaggatgaatcaaccgtgaatgaaccgaaaacgagaagaccgctattgatacttgatagagagaagttcctaaataaagagctgttcttggatgagattgcgagagaaatttacgagttcacgttgtccgagtttaaagatttgaacagtgataccaactatatgatcataactctggtagatctatatgcaatgtacaacaaatctatgcgtataggtacaggcctgatatctcccatggaaatgagagaagcatgcgaaagattcgagcatttaggtctaaatgaattgaagttagtgaaagttaacaaaagaatattatgtgtaacgagcgaaaaattcgacgttgtaaaagaaaagctagtagatctgatcggtgataatcctggttctgatctcctaagattgacacagattttgagttccaataattcaaaatcaaactggacgctaggtatccttatggaggtattacaaaattgtgtcgatgaaggcgatttactgatagacaagcaactgagtgggatttactactataaaaactcttattggccctcgcatatataagtaataaatgcatggtttgattacctgctcgtaatactacattctcccaaataaatagtttacatataaacgcgcggctaaacttcacttcgttacttgaaatgccaataataacacataacatagagtacaaaatcggaatagaaacgccgactgaagaaacactttcaatggccgaaataccattcttccgtttatcgtattcaacggtatcctcttgaaataagttccttttctaaactatgccagaaataacgcacgacttccacatccttaaatcttttatttttgtcaagttcgaccttttctacattccattgctgcacgtgttgtggtacagaatcaccggcaaagtggaaatagtagcctttgcagcgttgaaataattcctgtggcgaattccactgatagttattaaactgccacgtatgaccagtagtgaagatagcgacaactctgtcccaatattctggcttagtaaacatcctagtgttatcgactataataaatctaattggtcttgatatacgttcgaagtttttctctatgttaactaatccgtttggcactgacggtaagttacgaggattcacgtattttgactccagcaggaactgttttatatttgcaacagttaaaattgatgacgcagccgaaggaatcaaaataattggatctttgcgagggccacctgatgaaccatttgttttggaaatacgaccgtgcgcgcccttatgaccgggaggcaatttagatcctcgtaaagatcctttgatcgactgtactaattttagttctgcatcttttattagataaccaaagttgatcggcttagcaccacgcaatgcagagttgtggtccaccaatatacgttcatgtttcattgtttccaccacaactggatcggaaacttcactatcattttcaagagatgctgaagtggttgattttacagtcgacaattcaccagccaaagttttattttctatatctactttatcggatgtctcgcctttctgaccgggtgctttcagatattgggatgattccgtattgccagacaaccaatttattaaatcagttctttgtaaaaatgaaacattagtcaattgtttattctgacagtctgctagatagtctgcggcacttgagtccttattcatccaacaatgaacaattattcgtaactgtaccaatgaaccatcaatctcaatttccgtttcttcattcaatggaaaactatcttgggtactaccatcactggatagagtttctaccatggttgctttcgtaatatcatcagtagactgtccctcattattttttagaaccagtttatcgccgttctttaagtgttctctcagtctgtctaatgagttcgccataattttttcaccagtttcttgctcaaattattattcttttaacgccccgaattaagaaacagcctgttttggaaacgcaatttgaaaaagggtggaatattcgttgaagtacttgttttaaacctgtccaatcgaaattttcatccttatgctttgagaacaatattgcgttgccggttaaccgtctcggtgttcgatgagttgaaaaattatacactaaaaagatacatactattcaaagttgtaaaagagactcttagctaagggaagtattaacaataatcattcactttatactttacatcgcaattgctttcattaatttttgataaatggccaaaaaaacgaaaaataactcaaaaagttcaactccagtgaatgatgtaccaacaactgctggcaaaaagaaagcaaaaggaaaaaagggacaagaaccagagccagaagatgacaaaagggccaagcaacaaagtaatagagcaaaagtgacatccacagcaagctggacaggtaaattgcctcatacaatcttacacgaaacatgtcagaaacgaaaatggaataaggtagagtatgatatgaagaaaatcggtgataaaggtttcattgcaattgcagttttgtcattcactgacccaaagacaaaagaaacattgactgcaagaatgaacgatccaacctatgacaaagcttcaggaaaaggccttgtaattcctcaagaaactccaattgaagctagacacatggcctccactattgcgctatatcgcattgcatacaacaccaacctgcacatgatgcttccgccaaaccatagaaaaacatggtatgccctcgacgattttcgaaaagataacctgaaaacagacgaaaagcgtataaacaaactatttgatcttgatcccttcaagacaatggtggaagacagaaagctcaaagcccaacgtgaaaaagaacaagtggcccagaataatcaagcacagaaagaacaagttgcacgaaccattttatctagccatggtggaatttcttcttctggaaaggacaggcaagagagaaaagtagcatctcataaaaactcacataatccttcattagtgcggtttccaaaaaaggtttgggaaaattctatatttgttgaccttgatgaatcgtctagacaactgatagaaacttcattgaaagagaaaattgattggcaagctaaaaaaattagccataaaaatgagacaattgctgaaaatcgggaagatctcaaggcaaaattattaactctacaatttagaccaaaacacgtagaggaagccatgctttataaagatccattgtctttcttattgtttaacttaccggaagatgatttaccaccattttttcataaaaagaaaggtgatacaaaaaacaaggttgaaataacaaacctaccgttatcaactagaatgatcgttgagcgtttaacagaaattggtgtctcttcagatgaagccttattggctttacaacaaaacgatatgaatgaaaatgaagcggccgggttcttgacgagggaaattttaccaactttaaatagcaatacgaatgaacctgtatcagaaactgaatctatagaatgttggaaccaagagctagagagcctagagagcatttatgagggctgcgtgatggacgccaaggaagattcacactacacgctcaatttaattgaaaaactcaaaataaaattgaaagtatatagaaccaaaaattatcctgcatcattacctggtattgtagtttcaacctttgataaaaattacaagctacctgattatattaagaaacaaatattaaccaggttactgcattatctccaggaaggaaatctaataggcgatatgttagtatatcatatttatgaatggttgaaagagaatatatctaagataattgacaaccctggcccattaattccagattcagattcgaaaggtgcaataaacaaaagaaacatttcaaacggtaagagaagtataaataattctagttcgagaaaattcacaaaaaccaccatttctgaagacacgctctctgtcctaagggaagagtacacaaaaaggatcaaaagttctgaatacaaaagtatgcagttagttagagaacaactgcctgcctggaagaagcaaaaggttattatagatatcatcaataaaaacgaagttgtattgattactggtgaaacaggttcgggtaaatccactcaggtcgttcagtttatactagatttcttacagaaggaaaaaggagatttcggtaagactaaaatcgtatgtacgcaacccagaagaatctcggctattgggcttgctgaacgtgtttctgatgaacgctgtgtaacttgtggggaagaggtaggttacgtaataagaggtgtcaataaaaccaaagcttccacacgtatcaagttcatgaccacaggtgttcttgttaggttgttacagaatgctagaactatgttagaaaacacaattgttgttattgatgaagttcatgaacgttctattgatactgacttgatagtgacattgatgaaaaatctcttacatagagttcgcggcatgaaaattgttttaatgagtgctactgttaacgttgacttgttcaaaaaattctttccggggctagcaacatgtcacatagaaggacgcactttccccatcactgattacttcttggaagacattcttagtgaccttgacttcaagatcaagagagagaaggctttgtcttatgatgatgatagcgttgatgaaagaaataatgacgaccaatatttgaagccgagagcagattctaagttttttacatctgggcaaatcaattatgatttgctttgtcaagtggttgaatatgtacataaacgcctgaaagctgctaatgacaacggatctattatcgtttttttgcctggtgtgggagagattaataagtgctgcaatttgctagctaataaatcaaatgaagcagattttatggttctacccttgcactccgctctaactcctgaagaccaaaaaagggtgttcaaaaaatatcatgggaaaaggaaagttgttgtatccacaaatattgctgaaacatctattactatagatgactgtgttgcaactattgacacaggccgtgccaaatcgatgttctataatccaaaggataatactacaaaactaattgagtcgtttatttcaaaagctgaagttaaacaacgtagaggtcgtgctggtagagtacgtgaaggtttatcttacaaattattttctaaaaatttatacgaaaacgacatgatatcaatgccaattccagaaatcaaaagaatcccgttggaatccctttatttatctgttaaggctatgggtataaaggacgttaaagcgtttttgagcacagctttggatgcccctcctttaccagctctgcaaaaggcagaaagaatattaacaacgataggacttgttgatgagtccgacaagtcactcacacagctaggtcaatttattagcctgatgcctgtcatggatagtaagcatggtaaattactaatatacggcattctgtttggctgtacggacatttctgttttacttgtctcgatactcggtattggagttttgcctttcatcggaggttttgaaaatagggaaaagataaaaaaactgctatgtaaatatgaaagtcgtggggatttatttgcagtattggaaattgtcagagattacttcaaaatcaaagattcgagcatcaaaaggaaatatttgagagacaatttactttcctataataaaattaatgaaattaagtcatcaacagcccaatattattctattttgaaagatgtaggctttctaccaatggactataaagttggaagcatttctgatttgaataggaacgagcgaaattttgatatcctaagggccattctcacgggtgcgttttatccacacatagccagggtgcaactaccagatgtaaagtatctatcaacaagttccggtgctgttgaaaaagatcctgaagccaaaatgatcaaatactggattcgaagcgaagagtatcaggacaaattagaagaatataagacgaaaatttcgcaagagacgcaaaaggttgatttggaagatttaccgttacctgctactagggcattcattcatccaagttcagtcttattttcaaccaattcagtaaacttggaagacgctaagttactctctgaggtggatggtccaatatcccgtcaatccaaaataccaaccgttgtaaaatacccatttgttttgtttaccacgtctcaagttactaataagttgtatttgagggacttaaccccaactactacattatcattactattattcggaggggcaatctcttatgacattggaggtactattcattcaccgggcatcgttgtcgacaactggctcccaattagaacctggtgtaagaatggtgttttaatcaaggaactgagaacacaacttgatgaggccataaggaaaaagttagaaagtcccgattatgctaaaaaatctcaaattgataattctggtgctgataaaactctaaaaattgttgaaaaaattatagcttccgaacaatagtaatcagttcctactgtagtccctgtataataattatcatcttcattttcgaaaaggaatttttttaacatatagaagtgtcaaagtataaaacactaacaaaaatctaagagattattgcgactgcgtgtttttctctttgctgaatcagggctagaatcccgtaaactacatagcacattgtctttgccatattttaaaaattttgtggcgccgtcaaaataaaaaaaaaatactgaaggatgcgaggttcgaactcgcgcggacaaccgtccaacagatcttaagtctgccgccttagaccactcggccaaccctccgtcgataatacaacaacaaggaaatacaggatacgaacaccatccagtttaacttgattaatctttacgcatgcatattgctacatcttttttattctgcaatatacatctgtttatatctcattaatgttggtaagcctctgaaaaatttatcaaatactagtacaattgtttaccaacatcattttcgttgctagaaaattactatacaccgttaagaaaagacataaatcatgagactaatagaacaacactagggattagccaatttaatgggagctgaaatgcagggattaattatgcaattacaaaatgaatggtatcgtttgaaatgaaagaagaaacactaatattataacatagaaatatcgatttcttcctgcgaattcccatgtcctcgttgagaacttctaatatgttttgtatgcctaatattatagctttacaaaaaaatagaatctcaacaattatcccacaattcactcatgtcatgctgcctctcgcgtattttttcttgaaaccgatgctagtttagttgtctttcggcatcagctctaattttttcaagaatagtatctacagagtcaaatttcatcattcggagaattccgatgaatcggcatcgtcagagaagctatataagaagagataaacacatttgaaagataggatatactttgaaagtgttctggtgaccactatatcacttaagtaatacctaacaaagcaatggtacaagaaatcgatttaggtttgacatgtgatatgcatgttcatgtaagagagggtgcgatgtgtgaactagtcacccccaagattagagatggtggggtttcaattgcttacatcatgccaaatttacaacctccaattaccacactagatagagtgattgaatacaaaaagacactgcagaaactagctcctaaaactaccttcttaatgagtttttatctttcaaaagacttaactccagatttaattcatgaagctgcccaacaacatgccattcgtggagtaaagtgttatccagcgggagtaacaacaaattcggctgctggggtggatccaaatgacttcagcgcattttacccaattttcaaggctatgcaagaagagaacctggtattaaatttgcatggggaaaaaccttctgtccatgatggagacaaagaacctattcatgtattgaatgcagaggaagcctttttgccagccttgaaaaaattgcataatgatttcccaaacctgaaaataattctggaacactgcactagcgagtcggcaataaagacaatcgaggatataaataagaacgtgaagaaagccactgacgtaaaggttgctgccacattaacggctcatcacttatttttaacaattgatgattgggccggaaatccggtaaatttttgcaaacctgttgcgaaacttccaaatgacaaaaaggctctagtcaaagctgctgtatcagggaaaccatattttttctttggatctgattcagcacctcatcctgtacaaaataaggccaattacgagggtgtttgcgcaggagtttactcacaatcttttgcgatcccttatatcgcccaagtttttgaagagcaaaatgccttggagaacttaaagggctttgtttccgacttcggaatttccttttatgaggttaaagatagcgaagtggcttcttcagataaggcaatattattcaaaaaagaacaagttatccctcaggttatcagcgatggcaaagacataagcatcatcccatttaaagcaggtgataaactaagttggtcggtgagatgggaacctcgttaatatgcaacaatatgtaggctcatttgagagtatagaccatatatacatatttatgggaaaaataaacttaccttccaatagaagttatagatgccatcatcatgcctattgttatggtccgtatctctttacagaagttcacagccaaatgcgttgatatggtatattttttctcttcagttttttatcaaaaaatgccacaaccttgatttaatcttgcatactaacatccacatcttgagctttttgcttttcgtcattgctttcttcctcatcactttcactactattattcagcactccaatcatcttattgtaaatttctttatctttcgcactcaattcatttaagggcaaattacctgagttcttctcttgcagccaaaagaagtacctttcgttggatgaaaaaactaaagcaaatattctgccacttttactggattttattggaacccacatggtctctccaggaattaaaatcaaagaaataggatcaagttccctcccgaccggcttttccgttggacgccactcgaaatcccaaaatcccaattcttcctcttcatttggtttgatctcgatttcaccctgaactggaattggcgtacatagacgtgaatcttcgttgtattcacaaacaccagccctgaatttaattacagttgaactcatactcatcaacactcttttaaaatttataagtcaaccagcacttaggtagttttctggcacccttatagaacctaatctactggtcatagtagagtatttagtagcaaagctttcgccacctcgcgaataatatatcacgaaatacggaggaattttaactgaaatatatcaataacgcatatcaaggaggggatgacttgatgagttgaaaataatataaatggttcaagcaaccgtttgtacaccactcagtcaattattgcttcaattgaaattatagaggaccgaagattagtcatataaaacaggggtctttttttctttagggagattactattacaatgtcgcaacaggattcacagcgctggctgcccacggatcggctaatatatggtgtgctagtcaaatctttccttcccttacaaaggtatcctgagctggtatatgaaaacagcaattatgcgaacgtttatgtgggtgcagaagtttacgtcttcgaagaatctgtggataagaaatggtgtagagcgtaccaatgtttacgaccctttcctgaagaattcatatcgaatatgaactcggcgaatgatgtactgccagacgtgaaaccgaaagtagtgatatttcctagaaaatatgttcattttgaagcagaaaaagccgtcagcacaatgccatttttcaaagcacctagtgctgaggattttaaaccattgataagtaaagaatgtgagtcccgctccttttgtgacagcctatatgttagctctactgatgatatatcaactggtaaaccaagaaagacaccgagacctccgttcccctttttcagataccaaaagaggtcctttaaggacgaaatgggtcctatattatctcttatttcctcgcatgtttactctatgtattcaattggcgagttttctatatataggaaaatgataaaactttattatgatttggacactatacgatttagattgtctatgaatttaaccacagaggctgagaaaataaatctgataagagcagcaacatccctaagaactaaaatcgcaaaatttttgtcctccacatacaggaagaataaactaattgctaactctactccaagaaacccagatccttatggtttcgaaggaatttttgccagggatattgatactggcgaattgctctcatacgagatcgacaaattaagaactttagtgtcatcgtcaatgctttgtggtttaactaataattttcctactgtacctgtggtagagtccgatgatgagtcctcatctaacggactattcggcacagttagatcgagcattttggttaacttgaaagatctggcatgggatccctctatatcagatcctaaatatcaagatctttctatttgtgtatacttgagaaccaaagacgaagttttaacagagtcttttaccatgacgaagtcgtccaatatggaatcagctctagatgaaattcctgcaatgttattcaagaatattttggaaacgatagtccataaaaataaagtatacttagtagtagtgctgaaggaaacaatagcaattacaacagaaactgctccggaaatttcatcttacaatatatctaccgaagagtcaagttcacattccccattttctccatttaattcatcgactgagaataagattgaccacgtaaaaaagggcttagctgccggagttattaacatatctccggtattcaagttttataacggcctatcagttgcgaataaagctcagaggtttaacctttatctttatagctccgattcctcggattcgcaaaacttcaactcttcaaaggatgcggatttaggttggggcgggttaataaataagataataaaagattcttctgaaggcgtttctgtgaaccctagggctgtttctttatcggtaactgtaaaggaaattataggcaaacaagaggcggaaaaagtgctctccacatctttagtaccgataagatctattcccacatacttttatgataccatgtttagccaagcagaaagaatttatctgaacttaggtagggtgtcgctttatggacttcctgcagctgatacaaatatagaaaatgttaccgttcaaatatcctgcaggaataaggccgtaaaattttgcaaaaataagctcgaagagagatctggggactggaagtttgtttcagttcgtccaaatgagagcataggcgaatcgattagaatagaaggggtagagaacatgaacgaagacgagacattaagagtattggtatatttgaatggatttttgatggcaaaatcaaatatacatatcaagaaaaagaacgaaatcatagaatatagaaagggtaccgtattccaaataatgtcatccaaatcagtacctctaattcatttagagcttgaagcatcatattttggtcggagatataatatcaaccctgccattacaaatttcttagttcttcaaaccaaaaatgttgaattcgaccagcaacttaaagagcactattcagttacattgaagcagctgaataacgtttcttttaaagatttactaaagcattttgacacaattttagcacactatttgttacttcttgaatcggtgaatgaagctactgataaaaaaggcccttcttcaagtttacccaatattgtattcagtgaattcgtcaagtttttaaatttaatgttaacacaccaagaaaactctagatattggtttaatagactgtacaaaaaagtcatgtcaaaggaactagaatgtcccaatgttgcaccgatactaataaaacatatgacaacgatctttgataggagtcattcttcttggactagaacaggaactgcaatctgccgaaccatcctgtacataattgtgttggcaatcggttcgtctcattctgatgaaatgcctaatttcagtcattttttcagaagcttgcacaaatttttaatgcttgctgatgagccaataatggcggatcaaattttgttaatagaaagtattccctctatgctggagacaatgaccaatcactgtaaggtggaagacttagttcgttttgcgatcggactgtttgaatgttgccaggaaaaagaaatgaatcaaaaaatgtactccaggccactctcagttcgagaagaagaatatttgaatacaaagtttaattgcctgttgaagttaattaacaagaaggttttgcaaaattatttaaccaatacggaatccgtagataaactgaggttacagtttttatctaaaacccttgagtggttacttacgccgtatactccaggcgatgacaaatgttttcacgtagaatccttacgcttggttaattctgttttcattacaataatcgaagattacaaatttgacatgctacaaaggaacttgataaggttactaccatatttgtgtaagtccttcgtccatttaagaaggtactgtaagaaagcacgtttaatgaggcctcgaagagtttttaccatgctttttcccagagaaattccatgcaactacataccggttgattcaatagtgaatgatgaagtagtcgtagaagttcttctagagcttgccatcataatttgtgaaataacgaaaattgcatcaagcagatttccatcatatcaatctttcagcgaaatcataaacttgtgcgataaagacactctttttcaatcaaatttttattcacgacaaatcacgaatgaaaatgtctatacaataaccaaaacagtttttttgttttttaaacaagattggttcccaggaatgaagtggcttggcgtatcagcgttattaggaagatcgtctctaatattgcttagtttatgcaaggattatatcatagaaaataattcaccttctccatcaaaggagtctgaaaagagggttgacatgcgactttgggcagaatatgtaaaagtcatactactagtttcaaaccataaaagtgcatccttgactaagttagctattactccacgtaaggccgtttatttgatatcgggtgacctgaaaaaaatttcagcatatatcctaaatgaatgttgggatgccctagccactgggcactataatatcacttatgctaaaaagtatggattaggagccttgagtgattgccaatttgaattgtttgttcataatcaatttttgatacgtgagatctttatttttgctttccatagacatatcgatgcaacaagaatttgttgcaaaatactatggggattagggctaaatttttggaggatatttgggtccctacaaccagcagtgaacgcatgtatcccagaattattcagcgcataccaaatcgggaagcttcgtttgaatgattacgaattggaaaggtttgtttcttgtttgttttttatgatgcacgttcccgattctgacaccttttttcctgcttgtatggatttcttaagagatttacttggttttttgcatattgtaaatgaaatctacaaaatacctaatcaagaagaatttgatgatgatcggactgctcggcacatagagatgttcgagtacttgctagaagcaaacaggccagagttgtttcataaaatgatatatgatttgtttatccactttattcagaaaaaagactttgttcaagcagctttgagtctagaactcttggcaggtacgtacgcttgggattctaatgatactcttgaagcaatatctttcccgccattgccagagcaatcttcatttgagaggaaggaatatcttcttaaggaatccgcaagaaacttttcgagaggccaaaaaccagaaaaagctttagcggtatacaaggacttgataaaagcctacgatgagatcaattatgatttaaacgggctggcctttgtacatgaccaaatagcaggcatttataccagattacagtccattgatagactggttccaacgtattttaaagtttctttcatgggatttggttttccaaaatcattaagaaataaatcgttcgtctttgagggtctcccatttgaacacattacgtctatgcatgacaggcttctacgaagctatcatgggtcaaatattgtacactcacaagaagaagtggatatgttattgatgaatcctccaatgggaaaatacattcatgtagcttccgtcgaaccgtgcttaagtatatccgataattacaacagtagtgacaagaaaagctcaattaacaacaaagtgcggatgtacattgagaatagagatttgaggactttcagtaattctcgacgtttgccaggcgcaaaaggagtcactgacctgtgggtggaggaatatacgtatcatactatgaatacttttccaacactaatgaatagatcagaaattgtaaaggttacgaagagcaaactttctccacttgaaaatgcaattcgttccttacaagttaaaatacaggagttatatgggcttgaaaacatgtgcaataaaactctgaaggaccacggtgatgtgaacgatttatttaccgagctttctacaaatattacgggaacaatatcagctccagttaatggaggcatatcacagtacaaggcctttttagaaccctccacatccaagcagttcagtactgatgatttaggaagattgacgctagcttttgatgagcttgttgcagtattaggtcgctgtctaacgttgcatgcagaactactaccatcaaaggatctaaaaccatcacatgatcttctagtgcgtctttttgaggaaaatttcgctgaggagatagaaagatatagtcgtactctcagtgaggccaatcgtagcaggaataacatgattactgctcgaataatttcgcacaagaaccccaataaaaaggcaagcttttctggaagggatcatcacacctcagggtccaatcatagccaatttgtattagaacatagcgactcatttggcccaaacagtttactttttggaaaatatttaacaagaacgttatcccactcgtccactacgagcagtttggataaaagtggaattgtttccggcacttcgagcacctttttggcagggtcacagccaaacaccaacacagattcacagcacaagcatgattactcacattcgggataatatgtcagaagttgttcactataaaatatacgcatatgtaatcatttatttattcattcatgacttttagttgaaaagggcacatttttctttgtcgtaaaagtgaagaagacagcgaattttttcctttctccttcaagtattgcttttttgataaagtatttttcgaaatattgatacaattattgaatctttgtaccgtatcctttttttccttttttctaaggattcttcacgttgtaatttaaagtgtacagggaagaaaaatcgtcaattttaccgggccagattgtctcaggaagataagttccattttccgctataaaattctgacgttcttcctggtcctgagcatctaaattctgcaactgcttttcacaatctttcaatatagttttcattctgtttgccacatcctttctcctctttgcttctagaactaagttaccgtagctttcttcaaaattatcataaaattcacaaagttccttagttgtttgaatatcttgtgtacaggaatttttgaagctatcaatcagattggaaatatctttaaagattaatagatattccaaatttctattgaaatcgtttattatttcagaaacttcgctgtgtagttctgtcttttcctttatttttgcctgcaaaaattgacccaagttaagaattgttttgtccacgtcatcaattacctcatgcagagttttgaaaatgttgtatagttctttgtcgtcgccttgtaccaccttaaacagctcctcacgttcatcgttatcaatttttttatcttgtaacagcaatgtcttatcaaagtgctgtgtcaatgaattcattatctctgctaaatctttttcaaggtccgttagttccctgctaaactgctctgcaacatttgtttccatcaggttatctataccaaatttactttggaatttttgagttacgtccgtcaacttggtatcaatcagttctttgttaacttttctgaccatattttcgtattgaagcttaatgttttcaatttgacgctcaattactggcacttctttcagtttgtcattcaataagttaacgttgtctctcgagatgtaatctcctagtttagagggatcggtatcatctttttctgatatgctcaattcatttactataccatccaacctttgtactttagaagtgatttcatattgccagtacttcatctcatcaactaagaccactaagacagcttgattccattgtttctggattagctttgtcccaatgccttcctttaaaatagtgtaaagaaactttccttgctgtctcaagccaactattagaaaattgagttttgaaatactcaactgccaagatgacaattttttcttaatatctacaatccttaaattagcacttgaacataaaagttgagcatcggtcagcgttttcctggcattattaacaaattttgtaacatctgcttcgttcataggtgttaaatacgttgataatatcctcgcagtatcgaatttatcgtacgttatgcgactttcaaataattatcaagttagggatatcttgcaatttttaatactgaggccttagagcgcgcatctagtatttacattatgtcaaaacaataacaaaaatccaaaatttcgaaatagtacaaccgagagaggtcgaagaacttaagccttcagtacgccaaaacatggaggattcggactccaacacagataaaaagttctttttcaaaaaaagaagaatcgattcctataattatagcgatgaggaagataataattcaagcatgaatagtgacatgacatacactaatgatgccttgaaaactagtagcggcaatgccccaacgatctcaaaattaacgaagacatatggtattggtgcgaagttactttcgagtatgggatatgttgcgggaaaaggccttgggaaggatggttctggtataactacaccaatagaaacccaaagccgacctatgcacaatgcaggtctaggaatgttttcaaataccaactccagtaactatcacagtgaaaatgaggattacttgagctctgaggatgaggtggttgaaggtatagaacaagtcaaattcaataaaacctccacggaggttttaggcgaagcgttgttaaatgatagtggtgatatgactatagtgcgaacactgagagaattgaggttagcaggggtacaattaccagagagtatcctaaaagaattagaccctttaaatgcagtaccaaagccgaaaaaagatgttgttgtggagatattgcaagagctgctgggtattgaaaaaagtttggaagctattcgtcagcgcacctctccgttagaagtgcaagtcaaagaatattatggacaagagaggcttctttctgaattggaggttactttgagggacgaaagcaagcatgtttccctgtatgataagattggtgctattttaaaattgtccgacgacgagctcatagataggctaacgtcctgcttattgagaaaagaattactaatagaatttgatttggatcatttagaaaagccaaacgatatacttgatgagttaacgcaaattatagaactactcgcatatagaatggatacaacttcgaaatttttgaacaggacacaaacaacaatctttaaagttatatatcccaaactcaaaaaattttgggaagggtttgatatgactaaatcaaaaatcgacagcgctatcaccctattactggatttccaacaagtgctaagttttatcgggtgtaaagagcatatcatggaggaattcgtctatccaaagctattacaggaattagataattgggaacttcacgatgaagtagaccatgtttcgccaagaatatgggtcttggattttatggttttaattgacgataagatcaaagacacaattgtggacaagattgaagcaaaattttttgcttattgtaaaaattggtaccatagggaatcattttgtatcactaattctgatattatatttatcaaagaacttatctgcgaacgaagatattacaaaattttatgtaaagagtttcttcctaaattcctggacgagctgtgggaaagacataatgaccccatctacgagttagaggattggaaggaaaaacaggaatggaaagaaaaagattctggatttttctattttatgaaaaaactgagaagttatacccattattttcatccaaaacagtatgaattgatgatgcggggaacctttaataatataaacaaaatactctatcaatggcatctttatagtacagtggaagacttacacaagtcaaagtggtggcttaattggctgatgaatacggtatttgagcactctttaccaacagaaatagaactatcggagatcagaaaaagctataatatattcgctatgtctcataggtaccaccttgataaatctacattagatgaagatttcgatttgagacagggtttacgaaacttaatggaaacacaagtgatcgacgatattagtcaaagcgaacaagaacctacctatactgtacaaaatattccgcttggaaaagttagcagctctttcaaggatgtggtagaagactactgcctggaaaaagggtacttgatcagcaaaataccaaataggtacactcaactgccatatggaagagaccaagattgtatagttcctttatttgagatccgaaacgggaagaaaaaaatggaagttgctttgaaacatgatattctttgggtggaggattccagtgggacctttaagccaatttatttatgggcccttgacctctagaaagtacctataaaagaggtgagataggcacgatttatatattattgtcgaaaaacaaaattgattagattactaaataaataataattgcattaccatttttagacaatggattaatttaaagtggagtctattaattccccttatttgatagttgttggtattttgcccttgaaatgtttccaaaatttattgtttaaacttttatacttcgctagactctcgtagttagactgttaagagttgtggcagaaggaaacgagtttcggatgggatcaaaggaccttttttatatcaagatcaaatggagctgttattttccaagaaagacagaagaaagcccgaatgtggctaagtagtgagcctaatcaagtagtcagcttcacttgatattagtttatacgattactattttaatggagtttttagctcactaaataatttaatgcaaaaaaaataaacgaccccagtgagggttgaactcacgatcttgcgattaacagtcgcacgccttaaccaacttggccatggagtcttttatttccgatatctgctgagttaaaaattatataatattattgatagcttctatcattgaccttcaattacttatgttggaatatcaaaaatgtgagattttttttttcaaatagttttgaagaatcagcgaataatttgatactttttgggattcttgttagtaacggctattgttggagttaaacttctttaaatttgtagagtatgtggattttgatgtaattgttgggattccattgtgattaaggctataatattaggtatgtagatatactagaagttctcctcgaggatttaggaatccataaaagggaatctgcaattctacacaattctataaatattattatcatcattttatatgttaatattcattgatcctattacattatcaatccttgcgtttcagcttccactaatttagatgactatttctcatcatttgcgtcatcttctaacaccgtatatgataatatactagtaacgtaaatactagttagtagatgatagttgatttttattccaacataccacccataatgtaatagatctaatgaatccatttgttagttaatagtttaaatgtttttatcggaagaggttttgtcatcacatcagcaatgttcttcttggtctcgatgtagtatacgtataaattattacctgatacttcatctctaagtctcattgcctttgtgccaaaaaatctgtttctaaatttctcttcatttatttctagttcatcctggtctatataatgacctggttgacctggagctctaagtttctttccttttgggttcaaaggtacgtttagtttgggtaatttttctgtcaaggatttttccatacctaatttcatgtacttgcttctttgatatttgatctctaatccaagtatgtcgtactgaatttcgttatcaccttcacccagatttattatctttgtatcgtattgtttcttgagtgttgttatgattttcttatttgcatttaagtctttgctgaataatatcatatcatcaacgaataagcaaattgttacttgactattcttaaatacgcatgaccatccgcgaacttcttgcatgtcgcaacaatttattaaatatgatttaatggtttcataccagtttgcaccactttgtttcaaaccatagagtgattttctcaaacgtagtaacttatcattcaaacctaaatgtggtggaggtcttatgtataattcttctttgatatcagcatataagtaagcagaggatatgtccagctgtgtgatataatagtcattgtctaatgcgattgacaatgacgtcatcagtgcatagtgatgtacggtattggattgcatatcagaatcatatgtatcggggtgttgaatgtcgcttcttgcaacaaatctagctttgtgtgtaccatcacgtttcttgttaaatataaacattgagtttattacttttttaggatctatgtcatttctatcataatatttgtttgtatcccaagtgttcattttcaatagttggctaatttctttatgataagcttcaacatatctgtctttttctttgttgtctttattatatgtaattgcttcatcatatcttaaggtcgttcgaactggtttgatcgatttcactccttttattgctgcaattaaatttatgcgtttcttcgatcttggtggttccagacttctcatattcttattattccatgtgtctcgggatacctcaatttcagtttcattatcttctaatgatcttttcttacttttggtagtagtcagaacattagaatcatccataccacccaaactggaattagtctgacgagagtgtatgtgtggaatatcttttgaaacatcagaagtgtccgtaggagatttatgggttaagtcaggaagtgggaggtcgtcaagaatagaatcagccgtaacattttttgaggatttgtcaggcattatattaggagtcgcatggtcagaagatcgatattctggcggatccgtatcaatggagggtgtattatcacatacagcctttgtttctatggagatgatgggagtagtggattcactgttggacgaacggtcatctattgagggcgtactatttgtagtcctgtatttgatatttgtatcactatttcgttgaatatatggttcctccgtaccacccaaacgtgtagttttgatgttttcaagtccataattaactctatcctgtgaggtcaaatcaatcatctcattggtactaccaggtcggttttggtttcgtgcagtgaaggtagacgagtgtctaggtgaagtagtatctgattcaacggtaccacccatttcggtactctctttattaatgatatggggtgtacgagatcgtatagtagatggaagaatattgtattcagatatgtcggcatcaacttcttttggtgcacgtactttttggactggttccttgtctaattgtaaagggtttattgattgggacgagaagtcgttcactagaggatcagagtttatttcaatctccgattgatagtcatgatcagattctttattttgatcatatgactgctctgtttcattttgttcaataaaagattggttatgggctgttaaacgattgagatcatcatcaaaagtgagtgtatcgtagtcgaactggtccaatttcgtttgcttgttttgtaatataacgtaattggtagtatctactgtcttttttaaggatggaagatagataatatagccataagagtttcgtgatggatgtaaggcgtaacctggaatgccacgaggatgtattttcgagtcgggattatggttgttaactataaccggttgaccgaaaggtagtatagtagtaatgtccagtccagctaaacctgcatgttgtcttgcagatttatcgttttttggtgagactaatgaatttctgattatagtagaaaattcgactgctgagaaccatagatgatttggtagaccactgcaatgaagcagtgtgcgacaatcgtttaataaagtacgatttaatcgttcagcgacaccgtgtgctctagaatctgccgtggttgtatagcatgcagtaatacctctgttcgtaaagaacttatgaagagttttgttagtgtactcggagccacgatccatctggataactagaacgcgagcattgaattggttcttaataaatgctaatatcgatgtaaaaacattgaggatagattcttcacgacggtcgtgtaatgggtacacccattggaatctggttttctcatctgtaaacgatataaagtaagaaggtgcacttttcggtaagtgatgtacaggaccaaatatatcggtatgcaagtactgaaaaggctcatatgattcttggtactttagtcgtgatcctttgacatgcctatgtttcgtgcttttgccgattagacagtcaggacattgatatgtgctagcgttagaccattcaatatccgattctttcaaatatgtaactgcattcttcttaagagacttctgaatacttcggaagttagcatgtccaagcattcgatgtattaacggatatggatatttatttacgcttttgcttttgttgacgttgtttattgttagctttgaaatgtgcgaaggaattaggtattttttagataaccagtaaaagtctccatgtttgactatgggagctagtactgtaccatccgatctttctaaagtgtttctggtaaagcaggcagtaatattttggttagccagctcactcaaacttaatagatcataggctatgtttggtgtgtgtagtgcttttattgatgttttggtgccgttctgaaagttgaagtgaagattaccaatggcatttataggaatgtcttgtttttgagcatcgactatgtttatttcagaattgggtgttgcatggtgtaaataatgggctgatctgacaagcgtttgcgaagctcctgaatcaataagaaggtgatcaggtagttcgtcattcgagtctattgtgcgtgttggcttagattctttctgttgctggcctaagactaagttcgttgtcatcgcttaagtattgtgatgaaacggttgattcattaatgtgatcattgttcacccttgagaatttactggatgtagcaatattgtgagcttttgctgctcttggttttgaactatttgttctatgataattacgagttgtaaccttcgtgttagtcgtgtttggagatgtgcgagaaacatttttgtattcgctgtgttgtttgtattgggacggtttatttagattcatgattttattttcgtcatatattaattgaatttcagcgaataattgggaaagtttcatgttcgttttggtacgatattgattacgtaggtatttgaaatcaccggatagacctttaagtattagttgacaggccaatctgtcgctaacattgatattgttttcttttagcctttgaatgatcgtgctgactgtaatttcaaatgtatcagcagatgtacttccgttgtactcaaggttggcaagagctatccaatcttttaattcttgattgttagtttgcattttggacacacttttacaaaggacagtaaggatgtcagaataattaatttctaaaatttgttttacccatgttggcaataaatgaaatggggcaaatgcttggaaggtattgtatatatacgcatgttcttcataagtcatttgtcttttgatttcaccctggtcatttggaataatgtcaccgagattagagttcttcaaaaatctgatgtaaaatttaacccatgtagaaaagttttcttctgatgttaaagtgtgtggtggtaagacattatttctcacctttgtcttagcttgaggtacttcagagtgttgatcctgtgaatcgattggatcaggtgaggaagtactcagcggtgggatatactgtggcagcggatagtgtgggtccggttgataatacgcaggtgacgtttgataatgtgaacacgtcatcatagatggttgttggtaatgtgcccagttagaagccatagctttgtttggggtcatcatgccgtgctgttggtactgtccattctgtggaggtggtactgaagcaggttgaggagagacatgatgatggttctctggaacagctgatgtcccaggtgttgtctcttcttgagaattaaccttagtggaatctctatcaaattccggtaaattggaagctgaaacggctaacggatcttgatttgatgggacttccttagaagtaaccgaagcataggcgctaccatgtagagaatgtggattttgatgtaattgttgggattccattgtgattaaggctataatattaggtatgtagatatactagaagttctcctcaaggatttaggaatccataaaagggaatctgcaattctacacaattctataaatattattatcatcgttttatatgttaatattcattgatcctattacattatcaatccttgcgtttcagcttccactaatttagatgactatttctcatcatttgcgtcatcttctaacaccgtatatgataatatactagtaacgtaaatactagttagtagatgatagttgatttttattccaacaggttcacacgaagattgaaagtgtggccacgctaatttagtttattagggaaatgctcctggtcagttctaattcacccaacgtagcgcggaatattttaaagttaatatagtatttcgatatgacaagcacctctaaacaaaaggttattttcgcttttgttcattgagcgtgtacttcaagcctgatcctgctttttcttctgatttgatctgattcgattaagcaagcggtactaccctaaaaccgccatctgttgtaatatagtaacgtcgcaataaacctgtcatataattagcagctaatccttatattccatctcctcaatttgtgatatttatcgtatataattcccatttcagaccgtcatttagtagtaggcatctaactatggaacggctttacccgatcttggtatgtatgccataatgtactaccgctatcgatttaccttaaccctaacgagtgtctctagccagtattttaaacttccatatcacaactaatgttgaagattgtataataaaaacatcaagctatttaatagatgcgattaatctcctaatcgaaaacagtttgttcggtgtccaaatactgttttagtggactatgataaacgttataacagctattttgactaaaacaaccgtaaatttacacagataggtgttcacagtaattttttggggagttaggtcgaaatcttttccaaaaccagtcatgcaaaggaaatgcgtcaacttttggggacttttcccctactcaaacacagttagtcaacatttaaaggttgtgtctttacttaagagaaaattaactgagcttcggtcatacatacgtaatttcgctgcttccagtcgagcagttggtgcgctataatcatttgatgtttttagcttacggcttcttaagattttctattgttcatactgactcgtcgcataggccgcaatataaatcatttagagaaaacgttaacacatcgtttaggtaaacaacccctagagaggatgatcagtacgcaatataactgttcaaaatccatttcttgcatcaatattttattcaactattatttctggaggttttagtggttctgtataccccctccagccactgttatgaacaattaattgatactacttcgaatataaacattaaaacaaaaaacttattgagtgcagcaagttaacatgtatcgatataatagaagttccccttttgaacgaacaccagaaaaacgagtaagccgtcaagaaagccaacgaaagagcatcgaattgcccaaactgccaccattgaatacgaggaactcctttttggatgattctgataacggaacagataatatctcaattggctggacaccaatcagtgacacccagcaattccaaagcccggtccctcaggcttttacctttacatcaaaacatagtgcaaggggaaacggtactagctcttcagaatccacacccaaatcgacaaagtacgtcaaagaaagacgaccaccaccaccgccaccccttttgtattccactgaatcaatacggatagactcacccatggtatctcccagttctcagtcccgggaaagatcacctaataaactatcctttataggaaactcagaggaacgacatcacatggaatacatatctaaccattccaggatcttaaaatcaccatttgcgaacggatttagtccaaattcccctaaatctccaagagatagtagcaaacagcaggctcacttctctgatgaatcagatctacggtgtcatgaaagagaaaaagctttacccccaattcctttcactactactcttctgctatctccttttgatgatgaagactcagaattttttacgaaaccaccaccgcctctatcaacatctagaaacgtaagtgggaatagccgagtatcagaagccctagaaagtgtttattctgactcagattatacttttaataactcaaatgccaggcaaagtagttttaactctttactaggagccaagccattagaattagcaccaagcattactgcaccgacacaaccattttcaattcaatctatcgatgagcacaagctttatcaatgtgataatgtttacaaactttctgctatttatgagtggattttgaaagtttattttgaatggtttaatgaatgtgtcttcacgaaaatcgatcttttccaaattgttcaattacttttagagtttcaaatgcctacaaatttcgatcaagatacgatagactcaaatgtggataatattatggcttcgtttatttcccagaaagcagtaagattcgatatcattaacgatgaagaggtagccgtagttgtgggagggctggatattactggtgttttcaccgaactactaccgtgctattcattcatcgataatacttatggatctacaaactccctgatttgttattccaacgtttgcacacatggccaaagctctggcttcagaaaagaaataaaactttccgaaatcataaataaatcagttggactttggacagaatactggcacttgactccagatgatttagcagaaattaatccccgtgaagtacaaagacaaagctttatatttgacttaattattttagaagaaagatccttaaacatggctactgccgcggtagaaatctatgggaaacggtttgacaaatccctacttccagatgagcctgagttcaaggcattggcatttgatatcttcgaacctctaatacaattacataccgaatttcttttgacgccaatattttggaaattaaaaacgagaggtaagtttattgatggcgttggaaaaatctattcaaaatggtgtggtgaagccaagaatatatatttgaattacgcgaaagctatggcaacggtacacgaaatcataatgtgggagaagaaaaacaagacgaaatttgtaacatggcttaaggagattgataactcggttgaaattacaagatcgaagatgtatcatgatgttatattctttggggggtttttcaaatctttacaaaacatgcccgtaactctgcgctcaattttgaagaacacggatccttccatggaggattatgaatacctgaaaatagtaattaaggaagtagaaaagttgaactttgaagttaatcaggtacatggattagcaattgaccataggaaactagtaaggttttcgaaacaattagtattaagtactaatagtagtaatgcaacaagctatgtgaacgtcggtggtagtactaacgcaaatgacgatgatgcaattcaggataaactagctcttggtttaacttatccggaaaggaagttagtactatctggcactgtttataaaaagagggatttatggctggacccaaccccagtgtatatcgcattattggacaattgcttactgattacagaggaaataagtaaaggagaaactcaaaaatataagcttattgaaagacctatcccaatagattatttaagtctcgagaaaaggaaaattccaggaacaagtaaacagcctctgagaaactactctcagaaagaacataaatccccaatgcataatttttcgacaccgattaactccatgagacctctgcttaaaagttctggaaatcacatgtcaacagcgtatggagatagaaagactagtaatactgaaatttctaacgcgaatccaaacacagacgagttctcatttaagatcagaaatacagccacaggtgaatcgttcaaattttttacagaaagtgcagaagtactcaaccaatggattgatgctatcatggaatcttttaaaagaaatgcagaaaatcatgatttaaatgcctttgaatttacagtgttgagctctgagttcgcatacttcgacaaggatgcaccggtgaatctacctgtagctccggaaggatcagaaattgatgtagcactcaaagcttacgctcaaaaagcaaacaaagattcatgttcatggagtaagacaacacggattctttgttgtgaagatgttaaattcgagggcagaatttacctatttgtggctacaacagacggtatctatgtgaaatatagagacgattatggtagtggtttcgttaaaatattagaattaaacgacgtcaaaagaatggaagccaatgttaagttggggctcttgtttgtattggataacagaaagttgtgctattttaatatctcaacggtagtgagccgttacctagcgcaaggaaacactctagatgaaaactgcattgtgggaacagtaatcagagataaggtgagattcttcaaaattgctgatgattttggtaactcaaaacatttattttttgaaagaaaggggaagatagttatattaacaccagaatttgatcaattgacaaaccaagtaaaatatttcaaattttacaaagagtataagctcccaagttcaagtaataacattctgaataacgaaattgaggatattgccatattcaggaaaagttttgctgtgtgtacaaagaaaacagtcatactttatcaagattcattcgaggataacggaatagtcttaccatcttttttgaatgataaagatatgatggcacacttgaggcatccacatttgaatagcttaccgttcaaaagtgctacagactccaagaaacgcccctccatagaatctctcactgaagaagcaaaaaaggatatcgccacttgcaaagctataccggtcaatttttttcaaatatcacaatctagtttttttgccttggtttatgatgaagccgtagtgaaaataaactgctacggtgagatgtctgattggagaaaggatattctcttacttgatttttgttgtaccggcgcgagcttccatggtaatcatttgattctcgttggcgacaatttgatacagatttacgacttaaaaaatgttgagcagaacctaggcgaattggttcccgtccagatcataaaaggaaagaagataaagctggctagttcagaaaggagagagaaaacaattcttgtgttaagtcatccaaatatacttaatagacaattattagtcgcgtgcaatcctgtagcaatggcagatcatcaataatataagatatagacacttttaatggtaaatatcgttgtaataatataagccaacaagaatatagtccagtaattatgctatttgcagtaactcacatcattattctctctgttcatataatcctgaataacaggttaccctcggaagtgcatttagccgtataacaagtagctctttaaaatcagtagaacagatacattaatatgtgataatacggctgtgaggaaaaggtgaagttctggtgatgaatatagactgtttgtgtcgttgggtagttctgccactgctgcgctatccacttctggtagctcttgtattgagatggtatgtaaagtagaaaataggcatgaggttagaaacagcgttttttatactaacatgacgaactaacctaggtctctaagcgactcgataagcatttgtctaacaatctatacactactgataaatgcattcctcattgctaattcctatataaagcggtcgggacaggtcgcctggaagagccttcgtgaatttaagaatggcatagttcttattactggaggaagtaaaggacttggacgggccatagtatctcaactcctacaagactacagcaacctgaccatcttgaatgtcgacatatgcccatcatcagtgaggaatactcgcgtgaaggatctcatctgcgacctgagtgatgatgaagaagttgcagcactactgaatttgttgaaaagaaagtataaaaatgaaatccgattgattgtgaacaatgctggagtaagggccaacttcaccggattcaacggcatggaacgggataatcttgataagatttttaagataaacacatttgcaccacttcagttcattcaagaactggcccctagtagacactcaactagacagtgttatattgtcaatatcgcaagcattttgggcatattgacgccggccaaagtagcagcttatgcggcgagcaaagcagcattgatagcctttcatcagtcgtacagttttgaattgcaaaacgaaggcgtaagaaatatcagaacactattagtgaccccagggcaactgaatacggaaatgtttgcaggattcaagcctcctcgccagttctttgcccctgtaatagacattactactctagctgccaagatagtccgttattgtgagctgggtcagaggggacagctaaatgaacccttttattgtagttttgctcatcttttgatgtgcgtaccttattcgctacaacgcattgtaagaagcttctctcgcatagattgctgcctcccggacgagtagaaagctatacatagtaaatagaatatttatagatgaatccgagtagacagccttggtgtttgcttatacattctttgcaattatgcacgccctcattaccgttgctcatatttttgggcattaattgtattttgaaaagtgctcgttcaggcccgtgtaaaaaaaggtgatgaagcaaacattataataaacacttctgagaagccacgtgtagaggggtaagctatatcgtaaacaccgttggatgtggaccacggtgcactgataaaataaagatatagtagtagaatctgttactaatcttaacacttttgatggtagaaccggacatgcagaagaaggcaagtggtggcagtggcggttccgagatggatactttaaatgctaccagcaacagtagtaaacaaggagtttcaaataataaaaggaatccggtcagtaaaaagaaaccagggaataaggtctctgatggaagagataatgcacataattatcacggggaaggccgcagaaaaagtagcaaacaacagaggtcaagaacgccctataaggagactagtactaggatcaatgatcaagatatagatttatctatccaggaagaaattcttggtggtaatttcaaattacgaggcaggaaaactcaagtttccattaatcatttgttgaatttccagttacctgaagtcgaaagggaaaaaagtaggtcctcttcaagtaagaaatcgaataggagacgcgatgagcacgtacatttacacggtgacacatttgttaatgttaattaccgtcttttggtagatgatcgttttgactacccagagcaaaactgtaacccgaacgttcctgtcgatcaagaaaagattctaagagtcatagtgccaaagggtcagaattgttctatttgtctgagcgaggaaccggtggctcccagaatggttacttgtggccatattttctgtctaagttgtctcttgaactttttctccattgaagaaaccgtcaaaaataaagagactgggtactcaaagaagaagaaatataaagaatgcccgctttgtggaagtattattggccctaaaagggtcaagcctgttctgtatgaggacgactttgatgtaaccaggttaaatcaaaaacccgaacctggtgccacagtacatctacaactgatgtgtaaaccacacggttcactattacctttgccagtagccttacatttagaccctctaaaatgtggaaatttccctcccgcaaacttaggatcaataaagcattatgcgcatattatgaagtgtggcgtgtcttactccttggagctctatcaaaaggacattgttgctattcaggaacaatatgaaatcgacaaggccatttataatgatagtggaaaatttgttaagcagtcgattgaaaatatcaatgatcaaatttcgacgttgctggctgcaaccactgatttgagcccactttccaacgatattaacaacggtttggacaattttcattttgatgacgatctcttgaccaaatacgatgattcttccgcttattttttctaccagacgttggtggcatcgtccacgaaatacttcttatctccactggatgtaaaaatcttattgactattttccactattattccaagtttccagaaagcatcgagacgacagtcgaaaatatacattatgatacagtggtaacggagcaattaatccgccgctacaagtacatcggccaccttccaatcggcactgagattgcccttttagacttggactggcgtaaaataccattccttcccaaggaaatttacgaacagtttgctcatgagctaaaacaacgtcgaagaaaattcacaatgaaaaagcaaaaggaagataaggaaaagaaactatatgaaaaaaggttggaacaagaacatgccgagttctacagaaaggaaaatggcaattctctcaagtttgaagactctgtacagatggctacccattatgaatccattgtaagctcttccatacctctcaactccttaggaatttctatgctgggtccaccgacaaattcctgctctactcctcaaaagcaagcgccctcccacacgaaaagaacaatttgggggacatcaattgcagtgacggaagacgaaaaagcatcaaaggagaacaaagaatttcaagatatgttattgcagcgaataaggcaggaagatagttcggatgtcacagattcgacggattctcctcctacaagtaatggtaagcgaggcaggaagaagaaaggtaaagtcatgctattcagcagcaatcatcaagccttgggttaggttacagcatgttctgcttaaaaatctctttccaagccagaaatgtgggaggacctattctatatcatttcaaaatcgaactctatatctttatgtataacttcaaacgctattgcatataaacaattactcatatatagtccaaatgcattcataccatgttatactattcaattctagtgtcgttgtgcgtgatttttcacttttgaccgtaaatagaatttcggtgatattattttaactctcgaagaaaataaagtagattcatgtacacgtatatcaaaagagtacagtgaaaaagggataaaggatacactccacttagaagggcgcaagatgagtggaaaatttgttcgtgcttctaaatatagacacgtctttggccaagcggccaaaaaggaactgcaatatgaaaaactcaaagtgaccaacaacgcatgggactccaacttgctaaaaacgaatggtaaatttattgcggtgaattggaatgcctctggaggtggtgcattcgctgtcattccgatcgaggaagtgggcaaggctccagatcaagtgcctttgttcagaggccacactgcgcaggtcttggataccgattttgatccgtttaatgaccacaggattgcttccggttccgatgattctaagattggtatttgggacataccggaaaactacaaatttcacgatcatgtagatgaagatggagagccaattgatatcaaaccagtaaagtttttgacaggacacgcaaggaaagttggacatgttctttatcatcccgtcgctgagaatgtattagcatcctcttcaggtgactatactgttaaattatggaatgtggaaactggaaaggacatgattactttgaaacatccagatatggtcacatccatgtcattttcgtatgatggtaattatcttgccacagtggctcgagataagaaactacgagtctggaatatcagagaagaaaaaattgttagcgaagggcctgcccatacgggtgcaaaaaaccaaagggtggtatggttaggaaactctgacagattggctactactggtttttcaaaattgagtgatcgtcaaatcggtatttgggatgccttcaacattgaaaagggagatttgggaggcttctacactgtcgaccaatcatcaggtattttgatgcccttttatgacgaagggaataagattctttacttggtggggaaaggtgatggtaatattcgatactacgaatttcaaaacgacgagctgtttgagttgtctgaattccaatccacagaagcacagagaggctttgctgtagcgcctaagcgaatggtgaacgtcaaagaaaacgaagtcttaaaaggtttcaagactgtcgttgatcagcgtatcgaaccggtatctttctttgttccaaggagatcagaggagttccaagaagatatctacccggatgcaccttccaataagccagctttaactgctgaagagtggttttctggcaagtctgttgaaggtccaattctcgttagtatgagatctatctatgacggttccgcaccaagctttcatgaggctaaaagacctcaacagccaacaactcaagaaacagctcttgaagagaaaaaggagcagcctaaagtggagaagccaatcagcgaatccgaaaaggaggtgaaacaagaagctccaaaatctccctcaccgctaaagtcggcctcctcatcttctacaatcaaccatgtattaaaggaagataattcgatcaacaagttgttgaagaaatcctccgatattgatcaagttaacaacgccgaagatccgtctagggatacctccggatgggaagaagccgatgatgagccagctcctatcaaaatcgaaaccccagtcactccaacagaaactaaaaaggatcgcacacctaaggtcgaaccttcaaaagaattgaagccagagccagtgtctatcgcaacagatagaaaacaggagcaaagcttacctcaagaagagaagtcctctgagaaaacaaagtcccctgagcaggaaaaatccgcaacacctccttcttcaattacggctgctaagacagccattactgccagcagtaaggaagagccatccgcggcaaggacatcacctaagtcattgggtttaaaaaagtctgtcgaaaaactatctacattggttctgcaattagaagatgtagttgataaattaacgaaagcaaatcttgacaaagatgagcgcctgttaaagttggaacaaaaaattggcgaactgtcaaaatgaaaattttttgtacttttaatgataaaattaagtgagtcctttttataggaaagatgtattttgattatatgtaatgtacataagacggcggcgataataatgcacttagaaagtgaatcatgttcacctgtccactaacaaaaaaggaaacaaaatgttgctttcccacaggaaaaagaatgtttttgacaaaacactaagcgttatgtgaccaatgtataattgtcctcatcatatagttttatgcaagcataaataagtctttcttttagttaaaacgcgttacatagtaaaggtaaccctgaatgaatttttatttatatttttcttcgcatattttaggatcttgaaaaattaaccacaagttagaagttgatgagatcaggaattctaacaaaaggtcattggttaggtttattttgtaggtgcacgtttgcaactttattccttttgtttcaaagttatagagctttcattttctcattcttctctagtgtaggtcatttctcctgcatattaacctactagaaaagtttacgaagcttcataggaacgaataatcgatcactttaaaggcttcccgcactttaatcttatcatctacacctacaaaaaagctctactttgtcatttattttctacttcatctctgtatggcatctatctctatatatataaaaaagcgcatctgtttattataaatgaattccaacaatcctgataataataatagcaacaacattaataataataataaggataaggatattgcccccaatagcgatgttcagctagctaccgtctataccaaggcaaagtcttacattcctcagattgaacaagtttatcaaggcacaaatccaaatattcaagaggcaaaattattaggggagttattacaagttctagcagaagttcccaagggtacgcatttattttgcgaccccatacttgaaccaatatcaattttttccctaaccattttctcattcaatgaagaagctacggccacatggctgaagaatcattttaatccaattctctctgtttgtgataaatgcattctaaattttgcgagagggaagtgcaaaatgttacaacattttgccattcaaagacatgtgccgcatgaacatgtagccaagtttaatgacatcgtatgccaatggagggtggaggctgtttttcctattcttagaaatatttccgttaacgataatacgggaattaacattacaaatgaaattgaaactgcaatgtacgagtgtctctgtaatccgcatatgttgaggcttaacaagcaacttaaggctactttcgaagcaatcttcaaatttttctacgacacaaagcatcgtttgttggacgttacgaatccattaagcataaaaacctttatatcaggtgtcatattttgctggtgtgaaggttcaaaagaggaaaatgagtggtcacgagcttttctaaaggatttatactcaagaaatttccatataaatctttctaacctgacaccggatattattgaggaagtttatatccatattttattcttacagaatccggcaaactggacagagattgtggtatctcaattctggtcgagattactaccggttttcaatttatttgataaagacgtcttcatagagtactttcaggtcccaaaaaatgtggaatctttaaaaaaaacattcaaatttccgttagagccaatttttaaaatgtggtacaatcacttaagcaaatcatatcatgataagccactagactttttgttaagaggattaacaatgttcttgaataaatttggctccgagttttggtccaaaattgaacccttcacattccatagcattttggatataattttcaatagagattcattcccaatcaaactaatcaaaattcaagacaatccaattgttgagcatcaaacagaagtttactttcaacttaccggttctgtaaccgatttactttcttggaccttaccattttatcatgcactgtcaccatccaaaagaattcaaatggttagaaaggtctcaatggcgttcctgcgtataatagccaattatccatccctaaaatccattcccaaagcttgtttaatgaattcagcaactgccttgttgagggctgtgttgactattaaggaaaatgaaagggcaatgctttataagaatgatgaatttgaaacagtactgttgactaaaacagattctagagctttgctcaacaatcctttgatccaagacataataattagatcagcttcgaatcctaacgacttttatcctgggctaggtgctgcttctgcatcggtggccacatccacgatgatggtattggcagaatgtatcgattttgatatactgttattatgtcatcgaacgtttaagctttattcaggtaaaccaattagcgaaattccaatttcaaccaacgtcttggaaaatgttacaaataaaattgacctgagatcttttcatgacggtccattgctggccaaacagctgctagtatctttaaaaaatattaatggtcttttgatagtaccgtcaaatactgccgtagctgaggcacacaacgcattgaatcagaagtttttgctgctatcaacgagattaatggaaaaatttgcggatattttgcccggtcaactgtctaaaatccttgcggatgaagatgcatcgcagggtttttggtcctgcatattctcctctgataaacacttgtatcaagcagctactaatattttatacaatacatttgacgttgagggtagactggaaggtatcttagcgattctgaatagtaatttgaccgttaacttgaagaatataaacgtgatgctacaaagattaatcaattgtgaattctatgagccttgcccccgtgctgttcgtgttttgatggacgtagtgagtgcatttgtagacccgatttctggtgtgtttgctaatttccaaactttgaagagccaaaataccgaaaaggaatttttaaaattctgggaatcatgttggttattcttggatacgatttataagtttactttgaaatgggcttctaaatatgactattctgaactggaaaatttcaccaaagatactttagatctaagtcgctctttggtggactcctttagagaattttcagatattcttcatgaccaaacgaaaaatttacttctcaacgttttagaaacctttaagaatatgttgtattggctgagattgagcgacgaagtacttttggaatcttgtgttagattaattataagcacgtctgatttagcacatgaaaagcatgtgaaagtggatgattccttggtagaaatgatggccaagtacgcctcgaaggcaaagagattttcaaataagttgacggagcaacaggcgagtgagattctacaaaaggctaaaatattcaataaagcactcacggaagaggtcgctacagaagctgaaaactacagaaaagaaaaggaattatcaagacttgggaaggtgatcgacttaacggattctgtgccggcgtcaccatccctctcgccctctctgtcttcaaccattgctagttcttctgctgaatccagggcagactatttacaaagaaaagctttatcttcttcaataactgggagaccaagagtagctcagcctaaaataacatcttttggtacgttccaatcatcagctaatgctaaactgcatcgtacaaaacctgttaagcctttatccaaaatggaattagctaggatgcaattattaaacaacagagttgttcatccacctagtgcgccagctttccatacaaagagtaggggtttgtctaacaaaaacgacgatagcagtagtgaggagagtgacaacgatatagaaagcgctcgggagctttttgctattgctaaggcaaaaggcaaaggaatacaaactgtcgatattaatggtaaggttgtcaagagacaaactgcggctgaattggctaaacaggagttagaacatatgagaaagagattaaatgttgatatgaaccctctatatgaaatcatattgcaatgggattacaccagaaatagtgaatatcctgatgatgagcctattggtaattattctgacgtaaaggatttcttcaactctcctgctgactaccaaaaagtcatgaagcctttactacttctagaatcttggcaaggtctatgttcttcacgtgatagagaggactataaacctttcagtattattgtaggaaatcgaactgctgtgtcagatttctatgatgtgtatgcctctgtcgctaaacaagtcatacaggattgtggtatttctgaatctgacttaattgtaatggcttatttacccgattttcgaccagacaaaaggttgtccagtgatgatttcaagaaagcacaacatacatgtttagcaaaggtgagaacattgaaaaataccaaaggtggtaatgttgatgtcacattacgaattcatagaaatcattctttcagtaaatttttgacactaagatcagagatatattgtgtgaaggttatgcaaatgacgactattgaaagagagtattcaacactggaagggctggaatactatgacttagttggccaaattctacaggctaaaccatcgcctcccgtaaatgtggatgcggcagaaattgaaacagttaagaaaagctataagctcaatacgtcgcaggctgaggccatcgttaattcggtatctaaagaaggtttttctttaattcagggtccacctggtacgggtaaaacaaagactatactgggtattattggttactttttgtctacaaagaatgcctcatcttcaaatgtcatcaaagtgccactagaaaagaactcatcgaatactgaacaactgttaaaaaagcaaaaaattctaatctgtgcccccagtaatgccgctgtggacgaaatctgcctcagactgaagagtggagtgtatgacaagcaggggcatcaatttaaacctcaattggtccgtgtaggtaggtcagacgttgtaaacgttgcaattaaggaccttactttagaagaacttgtggataaaaggataggtgaaaggaattacgaaatcagaacagatccggaactagaacgtaaatttaataatgctgtgactaaaagaagagaattgagaggaaaattagactctgagagtggtaatccagaaagtccaatgtcaaccgaagatatcagtaaattacaacttaagattagggagctaagtaaaataatcaatgaacttggccgtgatagggacgaaatgcgtgagaagaattccgtaaattataggaatagggatttggatagaaggaatgcacaggcccatatcttggcggttagtgacatcatatgttcgactttatctggttcagcccatgatgtactcgcaacaatgggtattaaatttgatacggtcattatagatgaagcatgtcaatgtaccgaactttcttcaattattcctctcaggtatggagggaagcgttgtattatggttggtgatcctaaccaactaccaccaactgttctttcaggtgcagcaagcaattttaaatacaatcagtcactgttcgttagaatggagaaaaatagctccccatacttgctggatgttcaataccgtatgcatccttccatcagtaaattcccctcttctgaattttatcagggacgactaaaagacggccctggtatggatatcttgaacaaaagaccctggcaccagcttgagccattagctccctacaaattttttgacatcattagtggtaggcaagaacaaaatgcgaagactatgtcttatacaaatatggaggaaatacgtgttgccattgagttagttgactaccttttcagaaaattcgataataaaattgatttcacgggaaaaatcggtataatttcaccttatagagagcaaatgcaaaaaatgcgtaaagagtttgcccgctattttggaggcatgatcaacaaatcaatcgatttcaatacaatcgacggtttccaaggtcaagaaaaagaaatcatcttgatatcgtgtgtccgtgccgatgatacgaaatctagtgtcggttttttaaaggactttcgtcgtatgaatgtggctctgactagagccaagacaagtatttgggttttgggacatcaaaggtctctggctaaaagcaagttatggagagatttgattgaagatgcaaaagatagaagttgtcttgcatatgcttgctcgggtttcctggatcccagaaataatagagctcaaagtattttaagaaagttcaatgtacccgtaccatcagagcaagaagatgattataagctacccatggaatatattacgcaaggccccgatgaggtaaaatccaataaggacacaaagaagagaagagttgtcgatgaaggtgaagaggcagataaagctgtaaagaaaaagaagaaagagaagaagaaggaaaagaaaaagtccaaggcagatgataagaaaaagaataacaagaaggcagaatcgcccagcacctcatctggtacaaagaaaaagtcatccatttttggtggaatgagtgtaccgagtgccgtagttcctaaaacttttcctgatgtggacagcaacaaaaaggcagcagcagttgttggtaaaaagaaaaataacaaacacgtttgtttttcggatgatgttagtttcataccaagaaatgacgaacctgaaattaaagtgaccagaagtttatcctctgtattgaaggaaaagcagttaggtttgaaggagacgagaacaatttctccgcctgaaatcagtaataatgaggatgatgatgacgaagatgattatacgccgtcaatctccgattcttcattaatgaaaagtgaagcaaatggtcgtaacaacagggtggcttctcataaccaaaatttcagcgctagtatatacgacgatccacaagtttcgcaagcaaagcagacgcaggtacctgctgctattacaaaacacagaagttcaaatagtgttttatccggtggttcttcgaggatcctgactgcttccgattacggtgaacccaatcaaaatggacagaatggagcaaataggaccctctctcaacatgtgggtaatgcgaatcaatactcaacggctcctgtgggtacaggcgaactgcatgaaactctgcccgcccatccgcaagacagctatcctgctgaggcagaagatccatatgatttaaacccccatccgcaaccacaatcttcagcattcaaaggacctggtagtgggcccacaggcacacgcaacagttcgagacggaatgcttcatctagcccatttatcccaaaaaaaagaaagcctagatcatgatcttgaagtaaaagtgttaggaattatacctgcatatatattggtgtatacatttatattgaatttaatagcaacattatttttcattatttttcattatttcagcaaaaagaacattttttttcaatttgacgtgaaagagtttgactattacgtgggcatacaatgtttaaatttacattatcctcatggctactctagctatttgcatttcattcaactttttttgatatggcatcatttttattagcgtttactacactttcagaaatgccaatctttggtggcgatttgctagcaaccaagaatgagggagtcgagggctgttttaaatttgaactcgcgttcgaccctttatggcttttgtgtatatcaattggtttagaaggtagtgcgcttgacccatcttgtgcagtggtactttcgctatggagttcttcacaagctttcgaaagtacgtccctttcgtttgatattaaagttgtcgtgagcttttcatcagaagagtcaagaaggttatttaggtactgtattgtagaattgatcatttctgacatttcatttggaggtattttggagttgctgctgctccgaagtttggttattaatttgctttccaaatctcctacttttttttgacaatctagccataattcacgttgcgttagtactgtagaagactcatttttatttctcattagttgctcttgtagatcttcaattttcagttctatgagatccttcatatgaacaaaatttttcatgttgatagtttgtctctcattgtaatcttcatccgcgctggacagccttaaattgaatatcttttctgatagtgatttttcctgtgtcaggggcgactcgaatcctattcttttcattaattgatgcttagattcctctatcttggacaaatgaaaatcaatattacccatttcggaacgtatccgtccagattgcctttttaactcctcttcaatgaatttattgtcctttttgaagtctcttaataaagtttccagccttattatttctgatttagcttgcttatgagataattgtaacagtttgtaattacgtatcatttgatccgcagaagattcagcgttctgtacttcctcgatcattgcatccgaatcatccgtattggatagtattgtattttctgcccccactgactcgatatatttgtttagtgatgtccggtggtgcgatgaaatggtaattatggcgtccttatcgataacatagtccgccggcgcagcatcggtttcttgcttaatatgccacgacttccgctctttccaaagaagctgctctctttcgttcagttctagtagctcttgtttgtctcgaagtaaggacccaatttctcttttcaatagaccatcatgggatactaagagatcattaattctgcatagatcgtttaagcaaatagtgatatccttccggatgcttgtcacctgggaagccgaatttacatcagacaacgctttttcgtgaagcccgaccagagtgcctaagtattgcagaatctgctcctttttttctaaaacctgattcagttccatatttacttcttcactttattttgttaccttatagaacaacgaggttaaaatgtggaacaagaaaacgaaaataatcacttgaactaaaacgtactctatccttcacttttccattccttagccggttctccaatagatatatacagacgttctctgtgttctattatttgtatatgatttacactataaaaagactatctataccttttgttaattgcgcacctaaacgccagagcttacgcccttaaattttttgaacatatgcgctgataccctacaagttgtcctagggctaggatatcgggaaaaaagagacaagggaacttgaaaaaccataattcccaatacataaacctgttacttgatggctaacaagatgtacttttttccagtgacccagtggcttctttaaccactattgtgttcatttctaactctggttaattacataaatattagccttcaaagccgcacacgtttctttttccgaaaaatgaaaaatttttcactgaaaaaaaaaaaaaaaaaaagaagaaatagaaaggtataaatagttgaataatttgcccttccgagatccaacaagatttttgagtgttgggacccttggaggtttactccagtttcgtgggcttgtgcattttcacctagtgtactgggaactttctcttttttactctatttcttttctttcttgcttctatataacttaacttagaaagactttctaaactcgcagaaaagcacgtcatctcatctgtctcacttttattctaaggaaaagaagtcatcgacaggttaacagcagtaaatattatcagtgcaattaataactccgaaagtagtaaaagcaatggccgccgttagagactacaagactgccttggaattcgccaagagcttaccaagactagatggtttgtctgtccaggagttgatggactccaagaccagaggtgggttgacttataacgactttttggttttgccaggtctggttgatttcccatcttctgaagttagcctacaaactaagttgacaaggaatatcactttgaacaccccattcgtttcctctccaatggacaccgtgacagaatcagaaatggccatcttcatggctttgttgggtggtatcggttttattcaccacaactgtaccccagaggaccaagctgacatggtcagaagagtcaagaactatgaaaatgggtttattaacaaccctatagtgatttccccaactactactgtgggtgaagctaagagtatgaaggaaagatttggattttccggtttccccgttacagaagatggtaaaagaaacggaaaattgatgggtatcgtcacttctcgtgatattcagttcgttgaagacaactctttgcttgttcaagatgttatgaccaaaaaccctgtcaccggtgcacaaggtattacattgtctgaaggtaatgaaattttaaagaagattaaaaagggtaagctattgattgttgacgacaatggtaacttagtttctatgctttccagaactgatttaatgaaaaatcagaactatccattggcttctaaatctgccaccaccaagcaactgttatgtggtgctgctatcggtactatcgatgctgataaggaaaggttaagactattagtcgaagcaggtttggatgttgttatcttagattcctctcaaggtaactctattttccaattgaacatgatcaaatggattaaagaaactttcccagatttggaaatcattgctggtaacgttgccaccagagaacaagctgctaacttgattgctgccggtgccgatggtttaagaattggtatgggttcaggctctatttgtatcactcaagaagttatggcctgtggtagaccacaaggtacagccgtctacaacgtgtgtgaatttgctaaccaattcggtattccatgtatggctgatggtggtgttcaaaacattggtcatattaccaaagctttggctcttggttcttctactgttatgatgggtggtatgttagctggtactactgaatctcctggtgaatatttctatcaagatggtaaaagattgaaggcatatcgtggtatgggttccattgacgccatgcaaaagactggtactaaaggtaatgcatctacctcccgttacttttccgaatcagacagtgttttggtcgcacaaggtgtctccggtgctgtcgttgacaaaggttctatcaagaaatttattccatatttgtacaacggtttacaacattcttgtcaagacattggttacaagtccctaactttattaaaggaaaatgtccaaagcggtaaagttagatttgaatttagaaccgcttctgctcaactagaaggtggtgttcataacttacattcttacgaaaagcgtttacataactaattggtaactagggttcattaataataaaataaaactaaaaaatatgtgtttatatttattctgctcgcagttaagtatggaaatcaagaaatagactggaaatgatctatattttcttcgtattttgttagttcatattatctcttgcggatcgtgacagtagcacaagaattcgatgttgcatctcataggaataaaaaagaataaaatgagatttatcacagttgtggctttttctccgctccctttaatattttttcgtagtatttaatcttctcttgttcaacctccgataaagatggtggtaatttttcattaataaggtcttcctttctagccttttcaaaagtgcttagcgtttcattcaaaccttcagtcccacgagctagagcaccacgaggtaagacaccggcattcatagttttcaaatattccactttttcgctctcttctcttagcaccgaaaacattcttgaaactttagcaatagctaatatcttatttctcaaagcctttcttcgggtttcatcttctaatatcgctgatgacgccttttcatcagatggggtgccggtctccttagttgcgtttgctcttgcctttacagtctcctccgcagctttgggttccgattctgggtcaagttcctgctcactacatatgtttaatatagacactaacatgctagtaactttttcgccaacaaaaggtagtgaccaggtgaaaacatccataaaatcaggcaaccagtaagggtgcggagacatgtgaaactgcctgatgttcatgacgttttcttcatattttaacacagcagctttattatgatatgtgtccaggtagtttggcgcactgaacatggttattaagctcgggaagcctgttactttattgtttttatacattctgtacccagcatcctgtgcttcgtgtgctctaataatagataacaaaccatttgccttcaaaaacttgcatgatgctttaaaagtgaaggcgaaagagcaacccctcaaactgttaggtacgaattcatcctcgctctgatcaaattcgctaccatctcttgcatcatcataattttcgacaggatcggcccatagtaggtcacacatgagaccacgagatgggatttctcgaaatctattaattttattaacatcctctactgattttaactctggagagataccaccatgcacacaaaaatattgtccgttcattaaagctgctaatggtaagacattgaatgatctgcagcaagcatcgtaaacttccatatcgtatttgtgcaacatctcattcttaaaagtaaaataagaggtcaagtgcttacactcatggttacctcttagcatccaaaatctccctaaattattcaacttcaaggagtacaaataaatcagacactcaaaagagaatgcacctctatcaacataatcccccaagaataaatagtcgatttcggcggggtcaccgccaacttcaaacagtttcaataaatcataatactgcccgtgaatatcaccacatatagtaattggcgctttgagttttagtagattgggttctttactcaatgctacagttgacatatttaagatttttatggcctgttccttagaaagtcgaccctcatgaaagaaatgctctcttaaaaaggaatgattaggtaatcccgtcttggagtcgaatacttcctcatcacttggtatctttcctgttatggcaggtacagaagcgataggtcggtccttagtagaaattactttaccgttttctaattcgtattttgttaaatcttttttccggtcaacctttatgtaagagtcattaggtttaatgattttgatgcgtgaagaattcaagtctttcgacattggcgttgagagtgttttatggcagctgagctaatacgtcaaaaaaaaaagaatctaaaaaaacttttctttgaataatacctttaataaagcaaatattaaaggctttgcttcgttcttttataataatgcctcttgattcaaaaacattaaaggatttatacatttttcccttttgtttcccagtagtacgttctttttcagaattggaaaattcatgtttcaagaggcgatgacatgaaaaattttgaaatagatatagatgaatatcaaaatgattcaaacagtttgtatttattgcaacaggaagaaaggtggagtccaaagaaatctgcgaaaaatttttatagtgataatccttacggaacaatgagcacacaatatattgatgagacagcatttgttcaggctgagcaaggtaaaaccaatctaatgttctctgacgaaaagcaacaggcacgttttgagctcggtgtttccatggttatttataagtgggatgcgttggatgttgccgtagaaaacagttggggtggtccagactcagctgagaagagagactggattacagggattgtagtagaccttttcaaaaatgaaaaagttgttgacgccgctttaatcgaagaaacgttactttatgcaatgatagatgaatttgaaactaatgttgaagacgactcggctttaccgattgccgtggaggtcatcaacatatataacgactgtttcaatttaaattataataaggtagaaaaattgtatttggaatggcaagaaaagcagagaactaaaaaatcaaaaagagttgtgcatattgagggtgatgatgatgaagacgatgaagatgtagaggactatgatgacgaagatgaagatgaagagatggacgaggttgtacctgacttagtatcgtctaaacctgaaccaattgttgacgaagacggttttgaattggttcaaccaaaaggaagaagaaagcactagtatcttcaaaatctgtatattataattgatagtgcgctgcttttttgcacttccagtaagaaatagcaacaaaattagataaatctcggtggagttatccaaaatatgtaatatatatcaagaaagttacgtattaaacattggacttctagaggagatcttcaatatagatttaaaaggtgggcaatgcatcgctacgtgaagatttttacttttcttcaacatgtgtattttttatgtttcatatttttatattttgtgtttgctaaggtctaatcgttcagctaagttaaagctaagtataagaagcaaaaaatactaaattatactaaattataaattttcgtacataaataatcatgaggtagatgtttaaatatgtaaatagtttcttttttcttctttgtgattgtcaaaatttgtgtctatctatacaaccctctagaggtatatcttaactgtgtattatcatcaaattcgttattattataattgtcattatcgctattaatgaatttaaatttcttgaaaaaagaagatgtcatttccagaaatgaaaaagattcttttctgaagtttgcgatcttaaatagtcggatgtcggttccaacccaaatgttattttcaattatgttgtttacaacgccgggactaatttcttcttcaaacatataactattcaaattatctgtaatgattgacgtgctgacatttggatctctttgactagccttggtgtcatcactgccaccattgctgttatttccaccccatttccatttgaaaaatgaaaatccgccgttactactgttgttgctattaccattagtggaattattgttattagtctcaggagcaacatgatgagaatttggtctagttcttattgaagaactattagaagtagtcttctctaaagtaatggaggacgaagacgaagacgatcttaaatgctgaaagtgattttgcgctgtgttctgaaaaaaataattcatcaagttgccacttccgttactttttgttctatttaatgccattgttggggtacttacacctgagccagcgcttattgttctttctaagcttacagaagattgacctcttgatcttcgtatgtatcccaaacgatctgttgtaggctttgaaatggtattgccttcacattcgtcaatactaatatccaaaagagattcaaattgcctcaattcatgcgaaaaagtttcctcgtatttaaacgacgtctgcgtgaaaatatttgcccatgtggcaatgtggaaccacatcaacagcttatcattagtatgcatagacaaaggctgaaaagttgtcaatcgtcgaacatccagtggtaaccggggatgaattgtggtcaatatatcagatctaagagccgacagtttcgataaagtttcgaaatattgcaccgatttaattctcggaatttcaggaaccttcgacaaaatttgcttaataacccgcaaaagaatttgtaaataaactgtaccggaccaaacttcattaaaattttcatatttgggatttttacatttgtgagtaaacgttagtggtgtaggccattgaggtctatgtggccaatactctaattgatgttgcaaattcagatttgaatctgacttgaaatcaatgaatgcaatgacttggtagttcttatcatgattcgtacttgaaaaatgcttaactgtcccaggtgtttcattttctaatgacgcaggattgaaaagcaaataaggagttggagattcgttttcttgacctgggtcctcattttgattttggcctcgattgtcattttggccttgttgctgattttgatgttgttgatttgctgaagaataaagattgacttgaggcaaatcagttatctcttcaaattgatagaaatccttccattggactttccggttgaatcccatttgcttcaaggtcatgatatgcgaatttaaatttggattcatgtctaaggccttggatatagaatttatagagtcatttatttggtgagtgatggactgatgtctcaccattgcaaatagtagattctccgcatcgtcaaaatataaggtgaaaaatattgtgattgaccttaataataacgccaacaaatccattttgaaacccggtgagatcatatacggtatatcttttgtcttgaagacaggcgtagcgtaagttgtcagataaaccttatttgatgacttagaaagaacgtaaagtagggacattgcagcattgtaggatagtttggacgaggatgtatgactagaggtggctgcacttggtgatgcggacttcttctttgctgataatagaattaaatcgtcatgtgaatcatcatttttgtgagaactggtcaaaatttcgtcattaattggcagcagattgtaaatcaattcataaaaaatcggattcggttgtaaattgaatttaatgttgtctaaaatcaaattcgataattgtatgactgtaaaatctctgaacgtcaaattatttatatcgccgttgatgttggagagtttgtagaaatttggcaaattatttgtataataattaaggttgaaagtctgtagcattttgaagagaacaagtttttttgaagtcaaaatcaggagaagatgattgagtaaaggtaacaagatctgtgaaacgctattttcgttcagttccacaatagaacgctcgttgctcgtatcgttagatgtgccgttgctcgtggtggaagaattcgagcgtgttgttgatgaagacgacgacaacgatgaataatcataatactttaaatagtagatggaaaaaatgatgaatctacttgcaaacttgtctgcaaaataattttggaaacacttattgcaatcaatcaagtttgtcatgagaatagtcataggtatcaacaaaggatgaatctctggtaattgtggctttgtttgcggtttcgtatggtatgccgccgatgatgaactaggcaacgaagcatgcgaagatgaactgttatcgtgagagctcgtcgacacggctctccttctgctggcatcaatatgtttattgtttgtgaagttaaaaatgtttgattcttgttctatggcgagatcgatggggtatttgaaaattttaatgaaactagaaagaattaattttaaatcgtactctcgctgtaattgggtgaggaaaatggtaatgacattgtcttgggccttatatgacatggagagatttaaaacgtgcagacaagactgcacaaattgaaaataaagcgtctgccaattacttgcggtggcgtcggagctgaaaaaattagccttcaagctctggaagtctttattattgttaagtataaaccgcatcgtgcaatttaatagcgaggaagtgaattgaatgcttttgtccttaggcatttgagtacaccagtagacaagaaacatgtttatgtcctgtttaccgccgctcgtgtacaagtccgaagaaaataaagctgccaaaagacgtaaaagaagcagtctattggcaaaaagatgccactgatgatgcatattcagtagtgagcggtacttgttggaattagtcaagatgccgatttcccacaattcgcttgggtgggcggtcacggcagttgtgaaattatcttggaaagccagtttcaagatcgccaacagtagtctttctcccagtgggatgttttgcaagggaagaccctcaatttcatgttgcgtggcccaaaagacatcgtaatggtcctgcgtgctagacttgacccggtcaaaataaataggtatgaggatggaaagggtctttatggcgttgataagccgcgaagaatgaagtcccgtacgggaagcgggcaaggagttcgcggaaagaataatgtagagcgaaaggaagacaatcaagttgttgaagttgggtgggttcaaactagagataatgtgcaggatttttttaaaactagagttaatgctgaagtcctgcacgtccactgatatgaagtccaagtaaaaatcgttgaagacggtatctagcgggacatttggtttgtcgctgaacaacgcttcaacgtcaggcccagaatccagcttaaaaattgacaggtttaaactcaacggatcagcatcaactgaaagggagggcgagggcgacgacgtacgtgaaggggaggacgcatctgcgtcctccggtcgaaccagagcgatgcagtggttcagcaggatcgaactggatttggagtcagtatttcccattatgcatagcctaagggagaatttttatggtttgatttgtgtgtatttctttctctattagctttttctctgatttgtttgcttatctacctgtacgtgtatgttgtgtactcaataaatagaggtctttttttttttttttctccataggtttacccgaaagaaaaaacaccgaaattaagcacgtaaaccggcggaaaagcaaggaaaaaccccctgaagccaaagcaactgcgatagtttttattatttgttatatcctctataaaaaatgtgcgaacaagagaaaagactatataaagaatctataaaagagaaagtaaagtaggaaaaagagagaaaaaaagagagagataaaaaaaattgtgcaagtctgttaaagtcttctcttggatccattaaccattgtttcgtgctccgcggcaggttccgcgacgtcccatttctcgagcgaggacgcctcggtcgacattgttctctggtttatcagcataggtggtagcgagttagcagtgggcaagggcgaccttgtaaattgcggaacaataacgctcgagtaatctctaatgacacccggctgtagtgaagcgtccgaggtgctcggcgtcctcgatgcataaccctggtcgacccgctgtctgattcgcatacccacagtcatcaactggtccttgtggaaatcctgttgctgctgctgctgctgctcctgttgttgttgttgttgttgaagctgtctctttgggacgaggctgcttgcccattccagttgtgcgtccattaagtcttgtttgttcctgtattagtgtgtgatgtaaagcgtgcgtttcttgatctgggttctcttgctgtttctttttctttgttttcttctccaatccttgcctgttgctactagataaataaataccccactggcgggaaaaagaaaaagcacacacacaaacaaacgagaagaaaaaagcgcgtggtacgagccgcgctaatgaggaatagaacccatgcaccacacgcaaatgtgcgcacggacaaattctgccctctgttaacggcaggacctggcgtcccctgccgttagcggcgctagccgacgccgtagtcgcgtgcccttgcccttagcggctgactggctgactcgattgcatatataaattgcggccaccatacgttgagtcttgttgttatatggcggttgttcgtattacagcaaaggatactacaccacaagacaccacagcagcacagaaccacaacaccaatgtccgaagctaccctctcctccaagcaaaccattgaatgggaaaacaaatactccgcccacaactaccaccccttgcccgtcgtttttcacaaggctaagggcgcacatgtgtgggacccggagggtaagctgtacctcgacttcctgagcgcttattctgccgtcaaccagggccattgccatcctcacatcatcaaggctttgacggagcaagcacaaacactaacattgtcctccagagcgttccacaacgatgtttacgcgcaattcgccaagttcgtgaccgaattcttcgggttcgaaaccgttttgcccatgaacaccggtgcagaagccgtggaaactgctttgaagttggccagaagatgggggtacatgaagaagaacatccctcaagataaagccatcattctgggtgccgagggtaacttccacgggagaaccttcggtgctatcagtttgagtaccgactacgaggactccaagttgcatttcgggcctttcgtgcctaacgttgccagtggtcactccgtgcacaagatcagatacggccacgcagaagatttcgtccctatcttggaatctcctgaaggtaagaacgttgccgccatcattctagagccaattcagggtgaagccggtatcgtcgtgccccccgcagactacttcccaaaggtctccgcattatgccgtaagcacaacgtcctattgatcgttgacgaaattcaaaccggtatcggtagaaccggtgagttgctttgctacgaccactacaaggcagaggccaagcctgatattgttttgttaggtaaggctctctcaggtggtgttcttcccgtctcatgtgttctgtcttctcacgacatcatgtcttgctttaccccaggatctcacggttctactttcggcggtaatcctttggcttcccgcgttgccatcgccgccctcgaggtcatccgcgacgagaagctgtgccaaagagccgcccaactgggtagctctttcatcgcccaattgaaagctctccaagccaaatctaacggtataatctctgaggtgcgtggtatgggactgcttaccgccatcgtaatcgacccatccaaggccaatggtaagaccgcttgggacttgtgtctattgatgaaggatcacggcctcttggctaagcccacccacgaccacatcatcagattggctcctcctttggtcatctccgaagaggacttgcaaaccggtgtcgaaaccattgccaagtgtatcgatctgttataatattaatacgcattttttttatgttttctcgtttcttttcttttttttgttttatatcttacacatttttaatatactaaaagtaaaataaaaaaatacgtactgtttccctttgttttctcctcctctttgcttatatctccactgcgccatcgtcatcttcagagggcgtgctgattagagtcactgtgtctcctctgatgaacaccatttcacatcgtctttcggactcactcaactcctcgttgtttaattggtatatggtctctactgcatcactcagcacgatgttgcagtgtgagtcgaacgcttgcagtgtgcccaccagcgtcctggccccgcgcagcttgatgtacaccctctcatcgagattgagtttcaataaatccaaaggtgtctccattttcttgagtgtgcgtgatgttgtgtgtgtgtgtgtatttatctgcgtgtctctcccctgttgtattggttgctagaatggatggaaacatcctgcctcttgtttgttcaaacctcagctttcttgctttttttcttctttcaatatcgcgacctatcacacagcacggatagccaaaagggcgcatcaggaagaagaaaaaatatcatttcagcaaactaaaagaattgccctgaaagctatcgagccctggtaagagagtaccattctatctctgcggctagaaaaaaataccataaaaatataataaaaatgtggaagagatcgttccactcccaaggagggcccctgcgtgccagaacaaagtttaccaaaccaaagccaaaacaaccggtgcttcccaaagacaaaataagaccgcccactcaattgactcatcactccaacaacctgaggattaccgaaccaatcccaccaacaacctcaaacctgcgctgtcccgacgaccacccgctgtggcagttcttctccaacaagaaattcatcaggtccgccgacgacttgccgccttccagccatatcagaccctggagcatcccagagttgaggcacaagtcctttaacgacttgcattccctttggtacaactgcctcagggagcaaaatgtgcttgctcgcgaaaaccatctcttgaaaaacattgttggctccacgcatgacgaattcagtgagctctctaactctatcagaaccaccatgtggcaaataagacatgtacttaacgaaagagagctggcctatagcgcttcacgcgaatttttacaggatgaatcggagaggaaaaagttcttggatactttggccaacgattacttcttgaacaaggatatccctgatgacgaagtcgcctccatgctcacacgattccagttggccattttcggcatatcggaaaccatccaggataatacagtcgacattaacttcatcgacgggatcaagttcttggcaaacttaaaactacagcggttcaaggactccaatgacctcatatccgaaatatcacaagaaccgatcacagacgtgggcgagtcgttcatcttattcacttccgacttcgaacctcatgccgttcaagaggcttgtgtcgccatcaaagacctgagaaagtccccagataataaagtccctaaattagacgaactccccaccgtgagaaaatacttgaaacagctaattcatgcaagctccgtggagcaagcaactgcatgattcccgtgggcttcctaccctctctcctgtaaatatatatatatatatatatccacacacactcgcacatacatacacacatacatacacctttatatagctatacgctgtatgtattcagaaattagtcacgttgtggaaaatctccctagcaatgccgcctaccttactcttattgtcgttctgtccgtccagtgcgtacttgtctttcaccaggtcacgggcgcttagctccaattctagtgtgctccattgcgatgtaacaatttcgacttcctcaagggggcaaacctccagtaagcggcccaagatgctcatctgcagaacaattatctctgtgggaatttcattatccacccaatttggatcgacaaacttccccatttgataaaatgttaaccaatgctcatcgcccaacgccttcatcatatgttggcccgcttcttgacaaatttcaaacacttgcttgcccaattcgtatgctgtgccaaaatctaaattcaccaaggcatagtcaatatgtaataccatcaaatccacttccactttacccgtttggccctctctattaatggataagctgtcgtaaatcccgaataacaagctttttgtagttggcagatccttatacaatcgcgggttcagctctaataagttggatattatatcgagggggcaatctctatattctagaatgttgcttggtttgaaagcggtatctcttgcgccattgtgcgacttatttaggtttatggaataatgcgacaatttgtctgatatctcaagcaatacttccagcttagttagatttgtgcctgcccgttgcgacatatgcttctgaattatttgtaacgtttgcgaagcttttttcatttcaggctctttacgtaatccattagaagcattattgaagaaatgccagaagaacttcaccagaagttcatatatttgggtattgttactgtagtcgaatctttctatgatggcttcaatgtacgcgaactcattcatttgtaagaggatttccaatatactgtatagcttttcatccatactaattcgggtgaaaattttatcatccttgctgatgtccaagaccgtttcatacatggcttgcaaaaaactggagatttcgttggctttgttaaattcttcatggcatagtgaagagaaatgggccaactgagccgattcttcttcctgtgttatggcaaagatttctttaaatgaaaatttcgtggaacatttgatgaagaattccataaattgtttcatctctagagcagtaatagttttctgttcttctattgtaatttcatcagggaatccactcaagatactccataattcatcaagcttatgagttaaactggataaattaaataaattctcactgttgtgaaataatatatcaaccacattactttgcaattttctggacgcttcactgttatcttttactcctttttcgagactgtaatagagctttataaataactggtaattagtatcagattttagtgagaactgctgtttattgaagaattccgtaatgaacgtttcccatttcttcccataagacaaagtgggagctaattcatcttcaataacatctgctataccaatatatccttgcatatcctctacaccgtcaaatattatcttaaataactcgctatcaggcattttttcccattcgttgattttaaatatgagatgaagccgtttatttaggtggtcgaggggttttaatactccttctacccatcctataaattttgtagataacacttttgacttggcagtctcccatagtacagaatataataaaggtgtttcaggtatcatttcattacatattaaaatcctttctctcaaccactcctcaaaattctccaaggtcttgttattgagttttttgcttatgaattcttgcagttcatgatatctgttcgatctcgttgtggtatcactttcaattaatggaatcaaactgctgtcactttctaatagttctactattacatcttcgtcggttgtttcttccccttccggactttgcacctcctcttctaattcacgaagaaacaaaaggttttttgggtcatctaattctggccacaaaacacagagaatctccaagtacttggattgtgagcccagtctagtagacaactttttgatattgcgcgtgtcagccctagatgcaaaaatgcaagctaacaaatatagttgctcttccaacatttttactgcaattttcttggcaacctatcaatactctctgatataaccagttattgtctatttacaattggtttttcttttccctagtttttctttttctctgcaccttgcctcttcctcacaatttcaataaattacagtatatttacgaaagagtaacaaaaatttcaacaggtcacacagagcagaaatacctatttgaaacgaaaggaagatcgttcatgttgctatatatgttcttaaaaatgatttaaaattatacaaatattgtatacagtagtatagttatagaattatctttttgacgaggttaatgacatcatagaatagagagttattaaagagactaaaaaaattaaaatcgaaaaagaaagatttaaaaaataagatatgcatcactcctttttcctgttcctttcctttctattttattattggttcctttacacagtttccaagacttcgtccttgaaaccggtaaccttcttacccttttcttcaccagaaccttcaccgtgcaaagccatcaaagcaccgacatcgaactttggttgtttcaacaacttaacctttctaacatggatgttttgtagtgggaaaatgtccttggtggcgttttcaatttccttgttgataacttctggaatcaacttggaggtcaattgggccaaggtagatccttgaacttccttagtcaagatttcggaaataacctttctgatagctctgatatgggaagattgagcgtaagagtgtctcttaacttggttagcttgctttctggtgaaggcgatagcaaagattctcaaaacgtaatcatcagaagtcttaacagtaacgttagcttcgatcaaagtttgccactttctaaccatggatctcaatttatcagtagtgaagtccataccgtggaagttggtcaataaattcttaccttggacttcgtcaactcttaatttgatttttctgaaagagtggtcttcagaaccctgtaagtcagccaagcaaacttcgacaactctacctttcaaagcatctgaagcactcttcaaaccagtggacttgttaactaaagtcttaccaacatttctgttttcaaaagtggatggagctttaatgtcgaaccattcctttctggtaaatgggtcaacgactctcttcttttgacctttcttacccttggatagtctcttattctttccgacagccatgattaaacgattggttattcgtgtgcttgttttgtttccttaatattaaagttcacaacgtgaacaccttcctttcttaatagaatagttgtgacatctagtcattttgggtatattatcgcgcaggtgagagagtcctggaatttccagcggatggtgacgcgaggcatccgtagtgcacaataaaaagttagtttttcattaaccgaaaaaaaaaaaaaaataaaatatattaatgtttgggtttcaacgtttccgtgggtctgggtccacaacagaaaactgtcctgaagtttgattaggttttagtaagtaaacagttatggttacattattaaggaatacagaagagactgcatgtgtacataggcatatctatggcggaagtgaaaatgaatgttggtggtcaaatgcagtccatatttttgaattcttcatccatcgaaaaggcgtaatttatttctaaaggaagttttagttctaccataatgcttgcactgggctcctcgagcaccacaacaactaatttttctcccactaaatcattcactacacttatccaagaaaattgctttagtttctctatagttattgcgggctcccaggcaccgcatatgaccttcttaatttcttttgacgccttgtaccctgggttgtcccgcaacatcttcaccatcttaatcaggacggtctccagagcaagcgtatgacgattcgtgccttcggtttcttgcgccagggtatataaaaatgttctcatcaacagagacattcctataatcttctttgaaatagtttcatccttgaatccgttaatagcttctgagaaatagcgtggtaccatctcctgtgacactaccaatttacccttttgtagaccacctttccgtacgaagtcttttttagaaatttctacggcagcttcacatattttgaatgctttttcagtactaccacttacgttggctacgttctttgcaataagttgagtgattttgttgttgatcttatgattgattactatcacattatctggtattttctggttctgtccttcgcgaatattattgtaaatagtcatttccttcttatcatttactttgacatgaaaaggtttcaataaagatttgagtcgcgtgatgatcatttgttgcaattcattcttgtccaccttattaagtttgatttcggtaaagtgtgctttgagggagggcattatatttatttgctctctaatcgtcacattatgtccgccaacgcaaatgatagacaattttgaatttttcgaagaaatccatttctcgaaatattgtaaaatcttctcactcaatagattttccggattttgtattaatattagtgtctttctcttttttgctttcgggacatttgtaatatagaagtttaaggcctctagtgatatatcaccgcatagattttctttagaaatggcgaaccatattttctcatataatgcatccattcctgccagttccaaggcatcaatatgaatgtaatcgaaaataggtagttcctttcgggccgaagaggtgatcaactcatccattacatcattcacaagctggaatttagtagaatcatctgcattggtaatataaaatagtttattttgggaagacatcaaactgtcgtaaatcggaaggaatattcttgtaaaatcctccacttgtgattttagtagttctctcttttgtaaagattctctaattgattcctctaaatttatatcagcgttaaaatttgacagaatggtttctcttccagatgaagagcatgcttttctaaacttatcctcaaggcctgcaacgtccaagcttgactgttcgtctgttaatttgttcaattgggaggaatctgttacttgattatctggtgcaaaccggtctaaaattatctgatatttttttttcaactttgacaaagtagcgaaatcaatcatctttgcattacctttttctggtgtaggattttcgttcatactatgaattttggtgttgcccctgggaattccaggttttccatttccgttcatttcgttatctgtttctgtagtgtaatttttagaaaattcttgtgtttcttgaatgtggatttttctaattttactgctcaattcgcttccgtgagcgccacgtcttttatttactggtattattgcttcatcagaactttctgaactaacttcatctgtttcctcttcaagcccaccatcatcactcacttctggattatttgcatatacaaaattctctcggccgtcaacgagttctgtagatgtcttctctggctttgacccaggtttacttgaaagcacagatgtttcattgtttggctcataatcggattcctgttctgaagagtttattggtatttcctctgaaacaattagttcctttgatatagatcttttttgtaaaattttcgaagaatctgtaggtgatgtgagcgcagaaggggacgccgatgagatgttaggggaaacagactcttcttggggagaaattgaaccatgagttgttgacgttcctcgctgagacggtatatttccattatttacgtcatcatctgcagagggctcgattttaatttttttcattgaaggtttctttgctagtctttttgaagatctttcaactcccatcttatgcatcacctgtctatttgtcttctgcccactcactggtacagatactcttttcaagtattcatcagattgtttgggttccatttcctttactcttcttatgatttgaaaaatatcaattggtacaaacttttccgcagtaggttcgcatgcataacgtactagaaaatctctatcctctattttatcgatactactatcattccattgtgactctggcagtatctgtccaactgcaatgaaatccttaagccaaatctctgatagctcagcagttaaatataactcgctcttatttacttcgttgaaaaatttatctttgtaaaattctaaaggatgatcttcctttattagatctggcctgaattgttcgtagtacagttttggtttgagttcaaaccatctcaagtaagaaaaaacccaaatctccacaacattattaagtgtattgagtctgatctcatggatcaagtagacagaatatgtttccgtcacattatcattaaatatcacgctctcacccttcccaaaactcaatccatcagaaattcttttcagaaatacgttttctcctcctctttttcttgatcttcttctattgttgtcgtcaataaccctcccctgatcatctgtaatgataacttgccaaccgtccaaatctttcaatgttttagccattttagctaatccaattgttagaacaaaacaactttcttaaacccctgtaaggaaggtgatgaaagggctgcttatgtgtttttctttttcatactatgttcattttaacttttttggaaagaatagcgttttcgcggtcatattactgatgcgatgaaaatttacaattatttctttatttagattgatacataatatggttaactttaaatacatcttttggacgccgcataaacaaacgtcccgaatactttgttcccctggattcgttgtttgcttaacactgtcaactctctacttagtttcatttacaccatttctttgtgtatcagtcattgcgaatacccttgcatatctaatggatcgaaaataaatggtgatgtcaagaatacgagatacaatagccaggccattccagaaccttacagcccttgagaaagtggtacagtggctaagattagggacgacattactcataatctctttcgggttggcgttgactgtcggacccctttcttcgccaagaacattgtacatgtcacgactggatacttactctgctgatattacgacgggtttatttaccgtgttgagagagtctatggagcagtcgacatctacagaagaaaataacggtgtaggcttaacaacatccgaactgtatatattgactgcttacaccgaaagtcagataaagaatgttcctcagtacatcacagtgtcgctttatgggaggtgcgattcaacatataccatggtggaagtattcgactctgaaggaaatatgcatagcgtaaagaattcgactactaagagtacctgcagtagcataggaacggactatctttttgattatcgtgaggttttagaaagcttgggtttagatatcattttagattatgcatacaacaaaatcggttcacaacaggcagaaagttctgcatacacgacctacatgaggagtttaaaacataaaaaggccaacgtgttacatttactctatgcagttattagtttccaggtgtgtatgttatttttcatgatatggtactactacataaagggaaggtttatgaacgccctcaaagaaagggcacttgttcatatcaactctctactatcgctagttgttttcattgggggcctgataagtagcataagccttgcctgggttaactacactattcagtctagaattaatacagaattagaggccttcgggttttcttaccatcttggagttacatggtttgcgcttctgtggtgttttgcaggtttgatttctgtgtcatgcttagcttggtctggcttagaatggtgtatttccgataatggcacgtcctatggaggtggaatcgatgataaattcttaggctaccaagccggtgtatttactgatgcagatctagacgatgaaacttcttacagtcaacgttatccgcaacgacagtctacttcgggcgaggctgaactgatgagaaacagtgatactatggcaacaataagaaaaacatctgatgttgacttaaatagtgaaaatgatgctaacaccagtttagaccatggaaatcccaccgcaaatataagcaatggcggcaaacacgaaccatttgctactagagaggaattcgaattgcaggacataagattccggtcaagcaacgacagtgaagaaagtatgcaaagggttatcaagccttcgtcagcattacagttttgaattctttcacccatcattcaaaatgcatatgcatactatatttgtctagtttttaattatataataataataacagaaacaaaaaatcgcattcatcgtttaatcttatttttcttttttcacctttttcttgtgaaattgccaagcgcttaaaaaatcgttatttcagaactaaacatcattaagcaacgaagaagagaaaagcggaactataaccatgagtgatactacggaagtccctaggcaatcatctgagaacgaccaggataataacttggaaagaaccaactcattaaaaagtccggacgtgaccaacaatataccaagtcttttcaaattagccgccgaatggcaaatcaacaatccacaggaaaccttccaaaaccatatcctggaaaatgatgtactcaagaaaattaatgaaatcactcatttgatccgggaatcgtacaaagacctctccagtcaagatgggatgatgtccaaacaacaacaggaaaagatggattgggatttgttttgtactgttcctgtaaacattattgagcaatatacaaaagacatggacgaaatatatgaaaaaatggaaaggctagcaaaagtaagtataggtcgaaactaggcatcctgtgccatctcaattttactacgttcttttactaataatgcaaatttaataacagcaacaacgtctttggtgtgaatccgcttttcaaatagacgtggaaagatgtggtgactccattctcaatgctgaaacgtggatgaagaagaaagagcgccatttagagtacaaaaatattgaaatggaaagatccgcaaatgaaattaaggaaactattcaaagactaacagatgatagatgagccatactcaaatatatctgcgatattgctaatgttagctatttctcacatttgctttttttgattttatttatttacttttacgacaactggccttatcactcggctctctaaaagaagtcatgttcccttcgttgggttaattttttttttttttttttttgtttatatgttttttttttttttgccaggtattgttagcgccagatagcaaaaaattttattcagggatactgaacaccggggaagttaactgagtatatcggttatcattataaacacaagaatgtaagccagaaagaaaaataaacgtccacccctcgaactttcacatataagcaagtaaagaaaaagttaacaaaaggaggttcagaacatgacaattgaaagcactctagctcgggaattagaaagcttgattttacccgctgattccatagtgaatgtagttgaccaattccaagaggagttgttatcacggcttcagacaaatacgatttctatgctcccgcagtgtttagtcccagataaacgatcgcgatggaaccctgaagacaaaattctgaccattgatttcggcgggacaagactgaaatttgcaattatctctctgccccaaatcgttatcgaatacaatgatgccttcgaacttacctacaacatcgttgattcgaatttctttaatcaaatcatctatacaatatgtaccaggctggctgcaaatggttatataaaaaaaaagaacgagtcatctgaggcgtctaaattttttgtttccgtgacattcagttttcctctaaatccagaaggggaggtagttgcaatgggaaaaggatttgtgatgactgacacccttcaaggatccacggtgaaacagctcatccaatcttcctttcaccggattatatcagaaaatatcgaagaatttttctgtaccatgaacgtgtgtcatgtaataaacgatgcaattgcagtttcactaacaagcaaatttatatgcgaaaacgattccatctcattaataataggaactggtacaaatgcatgttttgaggttccatacggatatttaccacctttcaagagagatgccctgagagaaacattaccgtcaagctataataaggagacattaaatttcaaacatgttctcattaattctgaaattggctttattggtaaaaatgtcattgcattgcaaccgtttgacattcatggagcaatctcatacgaaatgccactagagtgcgttacttctggtaaatggcttcccctatcattaaaaaatattctattgcaatataacataatccccaaaaacttcccagtagagttcaatggggaactggtatgccagctggcagaagactgtactaatgcttggttcgaaaacgaacattatgcactaatttgtcagatcgcacgactattaatcaagagagccgcattttatgttgctgcaattgtacaagctattgatatcatcacaggctgcaaaaactataactttattcatattggctacgttggatcctttctccacaattcaaatttttatcgagagcagataaaatattactccagcatacatattaagttgcaattcttaaatcacagtaatcttctaggcgctgcaatagccacctacttgaacaaatcagacaaccaagttcaataatatatttcatcatttcttaccatcttctcgatctatttttattattcccagaaaactttgtgatgttggtgtagaggaaatgatccggcgcactaacaccacacgcttgtaacaaactaaggatgtcctgaccttttttgattatgttaccaccccatttttgcattcttctttttttttttttttttgggtctgaaaatttttttgcttctacttaattataattttatataatcatatatggatctgattcttaaaaaaaaatgaaaaaaagacaaaacaaaccatataggtaacaatttctcttagtgacataaaagaagaaggaacgataactttttcaataaacggaaatataattgttgattctttctctttggttttgtgcgatacattctgcaatccaggtaatattcctaacttcttgttccttggatttcatccaggcccaaacagtgctgatggcaaattgttgcgtgaaagcatctctacatagttccatttccaattggtaaaagtgatcttctaagttaccagtctccaaaaatcccctatactcatagacgttagctaaagcagctctaactccttcgaaatcttgggcttgcgccaagtgaaacgttgcaagagggtacaacttacctatgttaggtaacaagtcacttttcaaatctgggtcaatatctgaactttgcaaagagttgagtgcaatattgatacttcttctgtcagcttcaaaccctagtaatgtttgcatacattctttagcaggttccggaatttcttcagtgacaaaattgtaaaagtcttctaaataagccttgtacagcttatttctaataatttcaatgttcatatcgtctagctcctctgccgtgtcaaaacagtttttgaagtaaggtgccagtggggtatccaccaatacggtttcgtatagggattcaagatcagtagcaacactcaacgtaggcaaagtatcaaaccaacctagcggatgacaacgttgtaaaatttcacccttatcacgatcatgaatagtacctgtaatcatcaatgctacattgtcgatcatgtaaccataagtgatatagtccatgaactttctcgtggatccactggattggtctcttatgtagttgaattcgtggtacaacttgctagaagcatattcttgaatcaatgacgtggtcaaagactctgaggaaacagaggaaagaaaattaccataatcagttgatgataattgtaattttagatcttccaacgtgtcacattgtgttaagttgatgtattggttattagataacaacccatttctgtagcctctcactacaccttcaataaacccattgtcaatattgaaatacacgccttccatcttcgcaagactttagcaacacgatccgaatggtatactcttttgctagctcttagcgttctttatgccataccttaaagggttaagaggtcaattgttcttttgtttttgcagtatatcgaagatattttaaaaatacgtcactttgtacgcagatatcagcgtaacaataggtgcgcggaaattacttagttccataatacaagaatctgctgactttgcgtctgtaagataagaagggtacggcccagagtatgaatcgttgggggatgaaatcactttttcatcttcctacaattcattttgtccttgaaatacataataacaaaatattaatgaaacttgcatgttaccaaataacttgaacttcagcacttctatttgtataccagtatcacagcattcagcaaatttgattatctctcatgcttcatgtcctaccttttttccttctttcttccttgtcttaatctgaaagttactaataataataaagacaaaatatcacccatgcaccaaaatgtatgggtcataattttttttcttgccttcaaaaatcgttgttagctgcaaaatggcggtgaaacacatagttgtggttatgcgtcccctccgggcggccgcagatggaggatgcccccatgtgctgattctccccgtaggcggcgagtaatatcctcgcctaacctggacttgccgtgctaagtcggccttctagctgcgcttccgttcagcatcgtttacggtagagggagcacatgggcggaaacaaacctcattctggtcctgtgcttgcccatttgcactgtatagagtgtgtgagtttcaattaatgttgtaggcgcgaggccctgtaatatggcagttgatcaaaagtcaatagataattttcaagcaaaatctcatttaggtttgactactttcttgaacttggaagagaagcaaatatattcaacgaaatgactgcccaacaagtatgtgtaaagatgagtaaattgaaggatgtgatggttatggagatggcacacgtgcctagaggaaaatagttacccaagaacaaaagcaggaagggagctaaccttttaaatatgaactggacaaaactggacaaaatgaaaataacgattttagtaaaaatgaaaatatagcatcaaatgactgagaaacatagtaacaataactcatattatagctaatctgagtaaacttcttcctacgctaagaatttttttgaggatagtaccaaaccttgtgctgaatcagcacacgccatgcccaccatcaattgtgcaagaaaaaagtaaacgagtagtatactaactatatatgtgatttacatcacgatatgtcaattataggccccaaagtggtatccttccgaagacgttgctgccccaaagaaaaccagaaaggctgttcgcccacaaaagttgcgtgcctctctagttccaggcactgttttgatcttgctagctggccgtttcagaggtaagagagttgtctacttgaaacatctagaagacaacactctattggtcactggtccattcaaggtcaatggtgttccattgagaagagtcaacgctcgttatgtcattgctacctctaccaaagtctccgtggaaggtgtcaacgttgaaaaattcaacgttgaatactttgccaaggaaaaattgaccaagaaggaaaagaaggaagctaacttgttcccagaacaacaaactaaggaaatcaagactgaacgtgttgaagatcaaaaggttgttgacaaggctttgttggctgaaatcaagaagaccccattgttgaagcaatatttgtccgcttctttctctttgaagaacggtgacaagccacacctattgaaattctaaattgaactgaaaaaattataaatgatttaaaatagaatttcaaaacaaggagaattgatagagaatgcgttgatctgaaaatactgtttgacaataacggaaaggtaagtggatatgtaatctaagtttaatcctcttctaattcatttttcctatcaacattatctgtgcttttctatatccttctttttgtatctataattttttttttctcttacatagcaaaatacaaaaaatcataaatattaatatctaagggttcaagatcaggtcatcgccgttctgggccactaggctatatctattcatttacattggaagctgcatggtctactccaaccgcactgaggcaaagtctctgtggaggaaatgctgtcctagcgagccattgcaataggtataatcagagtcgtcctcccaatgtgttaacttctctcaaaaccaccatataaattctgtaacctgccagcgataatgttatatatgtaaaaggtaaacatacaacccaatttgtccatactaagtggatgctggggaagcaactacagtgcagatgctaaagtttgctgcggcaaataatctcaacatttttgtgattaaacctgcctcagtggggtgtatgattagtgcgttgatatttaatacacgcgtaaaagttaagtctgttgtacgttttatttcgagtgacgaaagaactacgaataacttcctgcatactgttgcctttttctgtatttacgtatacttttatatcaaatagcttggccaaaagaaagtagcattgtgtatcaagtcataattctaattcttagtttaacttcagcaaaaataatattcttcgtcagacattctcatacaatcattaacccatatgaacgttaaatttctcaatttcttgccttcgatgccctatgtatatttttatctcaaacccgaggcagtgaaaattttagctggtgcatcgaaaagagaagggcattgaaaattttacagtgttaaaagaagtgcttttcatgttagaatgataagaaaaaagaaaaagacaacaaaatatacgtctctaccatgtctgatatgcttccattggctacgtatagcctgaatgttgaaccatactccccaaccccagctctgaacttcaaaattccggttaccattagaatcacaatggcggccatcgaccctgagccctttgacgatgacaaaaagccatctactttaagaataatcaaaaggaatcctgaactcactcgcggtgagtactacaaccaagataacaatgacggcctcgaagaggatgaaagtgaaagtgaacaagaagcagatgtaccaaaaaggagtgtcaaatcaaaaaaaggtaaggcagtcgagcaaagtgaatcagaagactctgaagatgaaaacgaaatcgacgatgaattcgaagaatgcgttcttttaaccttatctccaaaaggccaatatcaacaagctttggatattaccattgcaccagaggaagacgttcaattcgtcgttaccggttcatacactatctctctaaccggtaactacgtcaaacatccattcgacaattcttcagattcagacgaagatgaagaagactattacagtgacgaagaatcttccaatggagaagaagaagaagaagaagaagaagaggacgatgaggaactaagttccggtgatgacgatcttgatgatttagtagatgctagtgacatcgaaagtcgtcttgatgaattagtcaaaaaggacgaaaagaagaaaaacaacaagaaggacagtaaaaggaaacatgaggaagatgaggaagaaagtgctaaacctgccgagaaaaaacaaacgaccaagaaagacaagaaagcagagaaagttaaagactcggaagagagcaaaccaaagccaaagacgaagctactggaaggcggtattatcattgaagaccgcgtcacaggaaaaggcccacatgccaaaaagggtaccagagttggaatgagatatgttggtaagttgaagaacgggaaagtttttgacaagaatacaaagggtaagccttttgtttttaagttgggccaaggcgaagtaattaaaggatgggacatcggtgttgctggtatggcggtcggtggtgagcgtagaattgtcattcctgctccatatgcctacggtaaacaagctttgcccggtattcctgctaactctgaattgacatttgatgttaaattggtctccatgaaatagggtccttaatgcatacgtattgatatatgtatctataatactatatacaattatctatacttccattactaatattatctttcaattttacatgtttttttctgccataaaaaagcaatatttttttgcgagctatttagtgatatagccgcccagctacttgtcgatgcatatattggctgagagtactaatacaattatcggaagacctcaaagtaaaatatagaagctttgagtaaaaggagctcgagttttaaaaatgacttcgtaatatgtaaagtttatgtcatatatacttacacgataaatagaccattgatcgttagagacgagcgcattgttttgttgaatccctttcaacagcgcgacaaaagttaatcgagaacaataagatgttgcattcaagggttagtcaaacatatcagaaggccgttttctaaatcacctcaagaacctaccacacagatacatcttgaagaggtggagtaccaaagggaatattttgtacgagcaagttatagtaaggacacttcagtgagaaattaatctgacttacttttacttaattgtgttctttccaaattagttcaacaaggttcccacatacaacctcaaatgtcacttcccttaaaaacgatagtacatttggtaaagccctttgcttgcactgctaggtttagtgcgagatacccaatccacgtcattgttgttgctgttttattgagtgccgctgcttatctatccgtgacacaatcttaccttaacgaatggaagctggactctaatcagtattctacatacttaagcataaagccggatgagttgtttgaaaaatgcacacactactataggtctcctgtgtctgatacatggaagttactcagctctaaagaagccgccgatatttataccccttttcattattatttgtctaccataagttttcaaagtaaggacaattcaacgactttgccttcccttgatgacgttatttacagtgttgaccataccaggtacttattaagtgaagagccaaagataccaactgaactagtgtctgaaaacggaacgaaatggagattgagaaacaacagcaattttattttggacctgcataatatttaccgaaatatggtgaagcaattttctaacaaaacgagcgaatttgatcagttcgatttgtttatcatcctagctgcttaccttactcttttttatactctctgttgcctgtttaatgacatgaggaaaatcggatcaaagttttggttaagcttttctgctctttcaaactctgcatgcgcattatatttatcgctgtacacaactcacagtttattgaagaaaccggcttccttattaagtttggtcattggactaccatttatcgtagtaattattggctttaagcataaagttcgacttgcggcattctcgctacaaaaattccacagaattagtattgacaagaaaataacggtaagcaacattatttatgaggctatgtttcaagaaggtgcctacttaatccgcgactacttattttatattagctccttcattggatgtgctatttatgctagacatcttcccggattggtcaatttctgtattttgtctacatttatgctagttttcgacttgcttttgtctgctactttttattctgccattttatcaatgaagctggaaattaacatcattcacagatcaaccgtcatcagacagactttggaagaggacggagttgtcccaactacagcagatattatatataaggatgaaactgcctcagaaccacattttttgagatctaacgtggctatcattctgggaaaagcatcagttattggtcttttgcttctgatcaacctttatgttttcacagataagttaaatgctacaatactaaacacggtatattttgactctacaatttactcgttaccaaattttatcaattataaagatattggcaatctcagcaatcaagtgatcatttccgtgttgccaaagcaatattatactccgctgaaaaaataccatcagatcgaagattctgttctacttatcattgattccgttagcaatgctattcgggaccaatttatcagcaagttacttttttttgcatttgcagttagtatttccatcaatgtctacttactgaatgctgcaaaaattcacacaggatacatgaacttccaaccacaatcaaataagatcgatgatcttgttgttcagcaaaaatcggcaacgattgagttttcagaaactcgaagtatgcctgcttcttctggcctagaaactccagtgaccgcgaaagatataattatctctgaagaaatccagaataacgaatgcgtctatgctttgagttcccaggacgagcctatccgtcctttatcgaatttagtggaacttatggagaaagaacaattaaagaacatgaataatactgaggtttcgaatcttgtcgtcaacggtaaactgccattatattccttagagaaaaaattagaggacacaactcgtgcggttttagttaggagaaaggcactttcaactttggctgaatcgccaattttagtttccgaaaaattgcccttcagaaattatgattatgatcgcgtttttggagcttgctgtgaaaatgtcatcggctatatgccaataccagttggtgtaattggtccattaattattgatggaacatcttatcacataccaatggcaaccacggaaggttgtttagtggcttcagctatgcgtggttgcaaagccatcaatgctggtggtggtgcaacaactgttttaaccaaagatggtatgactagaggcccagtcgttcgtttccctactttaataagatctggtgcctgcaagatatggttagactcggaagagggacaaaattcaattaaaaaagcttttaattctacatcaaggtttgcacgtttgcaacatattcaaacctgtctagcaggcgatttgctttttatgagatttcggacaactaccggtgacgcaatgggtatgaacatgatatcgaaaggtgtcgaatactctttgaaacaaatggtagaagaatatggttgggaagatatggaagttgtctccgtatctggtaactattgtactgataagaaacctgccgcaatcaattggattgaaggtcgtggtaaaagtgtcgtagctgaagctactattcctggtgatgtcgtaaaaagtgttttaaagagcgatgtttccgctttagttgaattaaatatatccaagaacttggttggatccgcaatggctggatctgttggtggtttcaacgcgcacgcagctaatttggtcactgcacttttcttggcattaggccaagatcctgcgcagaacgtcgaaagttccaactgtataactttgatgaaggaagttgatggtgatttaaggatctctgtttccatgccatctattgaagttggtacgattggcgggggtactgttctggagcctcagggcgccatgcttgatcttctcggcgttcgtggtcctcaccccactgaacctggagcaaatgctaggcaattagctagaataatcgcgtgtgctgtcttggctggtgaactgtctctgtgctccgcacttgctgccggtcacctggtacaaagccatatgactcacaaccgtaaaacaaacaaagccaatgaactgccacaaccaagtaacaaagggcccccctgtaaaacctcagcattattataactcttgtagtttacatggtgatactttatatctttgtattgtctagctattctaaatcatctgcatgtaataagaagttgatcaaaatgactcgctgcgtaaaacctctcttcgatcggaggtgccgcctaatttatcgcctagcactgcgctttttcaaagtttttcagagcaaaaaatgaaaagtaatgagcacaacaatagaagagtatcatgatatataaggtcataaaactaggtttcaggggctatcggcaatttgaggaaccttcaacctgcctcaagtaaaaatcgcttcgtaacattaatacaaattctttttgcaattatggaaggaagatcagattttgtggcgacttcacagtccggaagtgaaatgagccatagtgaaactaggaatagaactgggatgaatgctaggaaaaggaaattcgcctgtgtggaatgtcgtcagcagaagtcgaaatgtgatgctcacgaaagagcaccggagccatgcactaagtgtgctaaaaagaatgtcccatgcattttaaaacgagatttcagaagaacttataaaagagcaaggaacgaagccattgaaaaaagattcaaggaactcaccagaactttgacaaatttaacttcggatgaaattttgaagaaaattgaagaggaacaggaaattgttttggataacagtaatttcacaaaagaaaaagtaaaacaactcaggaagagtgcttttgagacgacagaaatagaaccgagatcatacaaaacacttcgaggagaacctatttcttacagtaccaacagaagacatacggattcttctcctttaacgctcttaagctcgtcgacaaacttcgaccctgttcactcaacaaacgttatgacagatgatcaacttaagtgcttgccaaaaagcctgggcgacgtatatttgtcaagcagcgatattgctgagctgtttcaagaatttgcgacaaaatatcatcaatttttacccgtcgttgacctttcgaaaggagcagagcgaatttatcacttatctccttgcttattctgggtcatcctgctcattggtttaaggcggaaatttggggctacagacttaatgactcgattatcagtgctagtaaagtcagttttatcagaaatcacaatatctccaataattcgatatactccatcagataaggacgaacccgttctaaatgtagcatctgtatattccgtgcaagcatttcttttatacacgttctggcctcccttaacctcttcattaagcgccgacacttcgtggaataccataggaacagcgatgttccaagcgcttcgggtaggactaaattgtgcaggtttttcaaaagagtatgcttcggcaaattcagaattagttaacgagcaaatacgaacttggatttgctgcaatgttgtatctcaaacagttgcatcatcatttggtttcccagcttatgtttcatttgattatttagtaatcagctctattagagtaccaaattcaaaaagccaagtagatatacccaatgaactaagacaaatggctcaaattgctagatttgagaaccaaatcgtaaacacaatgaactccaccccggcgagtgttactgggatggtaagtcaggaagagaagcagcccttgttacacgttcttaatcaacaactaagtcaattggagattagtcttgaagaaaataacctagatgatatccgaaaatttttattactagtggccaaggttcacttattaacctattacttcactgatgttacctcccaaagtgctggaaaatcaaatggtaatatttatgagggatcatattccattatggaactcgatacaagttttgaaacgaaacgtggattggtgaaagtttataatgccgccgtaaactttcttatacatgccaatagtatgtgggaacatgatcctaccattattaagtactttcctggtttgtttgtcttgaatatatggcaatctgcctgtattattagtaaactcatacattcatcacttcattcaatgctagatgttaactcaggcaaaaaagcttataacaacgcaatttcattgacgtttaatgcctcagttttaaaatatgatatggcgtacagatcatccggaataatgcgaagcatatggagtttatttgctaatatgtatgatgcctggaaaaacgaccaaaaggaaggtggaggtagactaaataatgatttcaatttaggcatcaccataaaatctaggatgtcagtaaacgttttttttgactgcttatatattctaaaagagaaatgtggtatggccaaattggagagagagaccaaggtttctacagcttacaatgttgatgaagaggaagaggaagatgaagatgaggagggagaagaagaagaagaagaagaagaactaagtagtaaagttccagaaaatatggatagccagcaactaaggacaaggaaattcaccaatgtaaggcatccagaaaagaaagcaagaaaaataattgaaacaattccgctagacccaaatccaataaatgcaggctctaccagcagtggaagctcattaacgaccccaaatagtcaagtagcgaacactatatcatatagaggaatcctcaataaaatgtcacctagggaacaactgaatcatgcaaatttagattccagtgtttctacagacatcaaggacactgaagctgtcaatgaacctctgccaatagggaggaatgctgaacatccggcaaatcaaccgcctctttcaataacacaaatgcaagaaaacacactacctgcgacacaagccaactcttctctattagaaacgtatcccattgttcaatcaaaccccgttacaactacaatcaaagaatcacccaattccatcatggcaggttgggataactgggaatctgatatggtttggagggatgttgatattttaatgaatgaatttgcgttcaatcccaaggtttaaagtccttttctttttttgccgtaatgtttacttaccctcgaaaaaatgttatgtaatgactgcggtgctacaggagaggtaaatgattttctatatacgtttatatttcttccatttacgcacactattttttgtccttgaataatttaactcaaaaaaagtgtaaaaaactgtgtcattaggtatatgttcaatacttttgatcttcaaatgacgtaaaaaaaagttttcagacggacttaaaccgccaaccagccttggccacaggtgtatgatgcgaagattcgtaagcgctcacgttagtcacatctcaggattggaaattatactagataataaatggctttatttaatcatattatagttgatataacaaatcacacctccgcttaatttatacgtaatagtatttacagtccttatgggtatcaagacatattaggttaggagaactaaagaaaaaaaaaaggactgtttgtgcaattgtacctgaagatgagtaagactctcaatgaaattagcacttttcttggatttctattaaagcgctagcatctttgtatacgtctgactgggtaaatttttgaaaggaatcgttattcatcagtctatacatttcattgctaacgatctcgaagaggggatataatttcctgaggaccttcaaagttgctggaaatgattcaaccgatttggtatcattttgggtgttgtccatgccataacgaacaattgtatgtgaattttctactgatgcattaggcgaatgcgtttctgccagagttaacggggcaggtttatattcctttaactgatgtttgaatccttgcttcttaaatgaacagttttcatttgaaagattttttgaaggttttagactcacttcaggtggttcacctaacgtgtcagcctccgttgagctaattgatgaagctgctgattccgcggatgcaggtgatggatcgtatagattagtaggaaagtgttccgataatggagaatgagggtgcaacatgatgtcagaaatattctgacgcaagttatgatggatatttaattgatatggtgatcctatcatgatataggacgaataaatgtgatatgccatttcaaggcactcattggcctgtttcattaaagctgaatcaatcgtttttacgatattgttttttgaagtactggtattagattttttatcacaatgcttagaatctatcaattttttcagaattgtcattttcttcaaaaacctcttaatctcaatgaagacatccaaattttctacacaaagttccttttctaaatggcgcctgaataaatatctcatacctggatcagttagcacatagtccagtttatttaaattactcgaagagataagcatgtcttgagaaaaaccttcactatcatccaatgtctttttttcatcacgaacagtcatatgaccccttaatgtgaaatctaggtctatggtgctaccatttggtgctctaatattattgctcttacaacctgtccaagaaaccaaatcccaaccacgcttggacaaggtaaaaaaagaggacctgctaatttgaaactttttcttgtcagtgcgtgatggttgtaaaagaactggtacaatcaaccccgtttttaaaaataacgctgccaacgagaccgcttctttaacatgcataatatcagtacagtccattatccactgccatatagcctttgttgtaaaggtgtacttaatcacgatttttttggaagtgccaaacgtcttattttcaaacaacctaatacctgcattcgaaacgtagtattgcgtgtgcgactcagaatctggatttgtaaagaatcgatgagctaatggcgataccctttctaagtcatttatatcgatgtttccaatctgagcttgccatccttgttctggcttagatttctcaaaagtaaatgtatcatcattattagtgtattccaacaacgaagataggcaaggtaatgggtcatctgcgtttgttggagaccaaacatttggcttagcgcccatcattttaatgaaaagaatatggatcaaataatcactatggatgattgaatccgtgacagagcttctctcaaaagtgaaaagtttcatggagttaaacgatgacaaaagaatatcaggcattgttttcaacccaatatctctaacatacttttgtaaaacagcaactcccttaggtgttggttggaaaagaactttctcttttggctcgccacgagttctgtcctgcggtgtatgtagtagcttagaagacataaataatgtaagaaggtggcgcgccaaactaggtttaatattatatgaaacgttaatacaagttgtgttcatatccacttttagttccaattgtcccattgctttaatagcttcctgatatgtaaaagtgaagtggaaatgtttagtgaatgcagttaataagaaagacttagtgtcactactatgttttttctctttcaaatccaaacaaattagaaaaatggaatatactgtctttaaatcattggtaaagatcagtccattcggcgttctgctgaaatttttggaagataattcatgcaacgtcctatttttatccaccatcttacaactctatctttaattaccaaattgaacctataacgcctcagatagtgcgtgcaaaacctagaaggaacgtacgacagtaacacctccaaagttaaaggacgatgagaagtaaagacagagctgggattatgatttcattcaccggtataaatataacaggacagacaacaattctaacgcaccagcaaccaaatccaagtcctagtcaaaaaaaaagcagtattgggatcattgtttcaaaattgaatattatgaaacgtttaaaacccagacatcccataattattgaagatgattcagttaaaacttcgcatacttcatggcttcttcattaatagagacaacggaggtggttcaacttgaacttttccaaaggagttgccatctctttgtattgttcgaactctttcaaaagaccttggtaatttatctatcatgtacttttcgagttaacttaagtggaagacgctggtttttcttaaagttataagcactatgtgggtaattttttattgtcagtctgtttctgatcttatccaacaattcatcaaaagttctactctggactataatctcagtgtaagcgttaaacaaataggtaaaagggtgcggaaagaccttcaaaaattcgaaaaagattgctaagttggattctttattattcaactggcatgtgacaagcgagttgtaagactgtaataacttgcttccggaatcaaaggtaaactttatcatttttttcaaatattcttgttcttgagcgcatgttaatatcggcatctcaaacacagtatattttgtgttgagtttctttttgagggatgtcgataggagagacgaaatgctaacgttatttgaataaatgaggaccttaaatgcaatgttattacttttttcaagtaccgataaaacattgataaattcggtaagcttcgaaggttctattatagttgaagtagataatttatctaattgttcgaatttgaagtagacaatatgatcgatactttcgtcattatttattttcctcataaccatcatcattaggtcagacgtgtgatttgaaggtttttcactagcttcgaaatctagttgtccgctatatgaagcctgccccattgactcgatacattcttttgatttgcttgattgaataccctctttcattaagtagtcattcatttctataattacgacatttatatcgactaaagacagtgtttctgaaactgcacggtcgataccagcatattggtgtatatgttcaactttgtcgaagaaaacgatacaatttttcatactcctaagattttttgaaagaaacttacttaagctcggaacgtagcttattgacaaataattggtgcctagctcttgcaaggccattgatttgaacttctggtagaaaacatggtccactcgctccttaactggactcggcttacacacctttgggctgctaacactttttttaattggaacaaggttcaactttctcagtacagtaaaatttttttgctccaaatcatcgcttattgctttcacaatcttgtcactgtcaacaacctttttcgatctccttataggtgcaaaatcggaatctacatgctccattgtctctatatactaaccacgttcgtatttatatctatattcgtacatatattgttctaacttattgaaattgatggttaagaagatcccttctgtacatatctgtaagcgcaatgttttcttcattgaaaacagctgcaaaattagaaaactaaaataataactttcaagataactaagccgggttgccctttgacctagaagcatcccttataataacattatgtgtatgaaaaccatgtcagcaagaacggttacggatatggagtgaagcaaaatctttaaggatttatttacattgaagaggaggaggaaaaaagagccataaggtaaaattcaaatgcataaatgaaactgcccttccttttatacttcctaacctttgcaggagaaaaatatattaaggacaaaagaaaaatagccgctatcatttccaacgctccgggaaaaagagtgtcatagagaccccttatctattttatcatttttaatatgatctattctggcataagtagcttcggatcgattaagcgctattacaattgaaggagtaacaaatttttgggtgaagtttaccaatttattcaattgatcaaatttatggaagatcctcaagaaaaacataaaattaaaacctttatatccagagtttcaaatttgtcaagtttttgttcccgttcactcttgttctgcatatttttcctatttttttggcttgtaactcaaacatgaactacatcacaaatatatcacgttacacgggaaatatacttcccattgcatggaaattaagacggaaataagggagacatgaaaaagggtcttggtggtgttgcagttggacaattaagccattcaatgcgatataaactataaatcccttttaaaagggcctagacatctcagagacaaagaacggtagctattacaaaggacagtaaaagcaaacagctttaaattagatcagaacataagaatccttagaaaagccctttacctcggtatatgtagatgatgtttccgattaatgttctactgtacaagtggcttatatttgcagtgactttcttatggagctgtaaaattttactaaggaagcttttaggaataaatataacatggattaacctgtttaaactagaaatatgcggtttatccttagaagatggtaccgtcaggctaaaatccgttcgttttgctgtatttgaaagaaagcttttcatcaagggtctacgaattgattccaagaaatcatctactaatgatcttcataaagaattaccaagagaggaagaaagaacttttatagagacccccgaagataatggtgggggcttcatttctaagattctttcattatcacaatactggctcaatggggtcacgatcattttggaagatacgcaattagtcaacaacgatatcacgattgaaaaatttggcttttttctttcaattgataactctaaacatatcaagtcactaagatttgattcctttttgagaaaacttctttggaatggccagaccatcattgctgatgccatttttatagtgaatacaaacttactaattggtgaaattatgaatcctctgaaggatggacttcaagtaggattagatttaaaactaggtgatttaaatattcccatgaatttattgaatttatttatcaacaaggagaacgttgatttgatgtccaatgaaaaacttctacaaagattggcagatacaacaaaggcgaatgaagagctaaaggatgaagatatcgctaagatgaaggatgatctcgtgtatgcaatggaaaaatttgtagatcggataaagccattgaaagaaatgaacgtcaccgttgataaacttcaaatcaaagattttccactcaccaatcatccagaactgcttggaatgaacaaatatatcagttataatgttttggtttctaatataaacttcaataccaacaggttcagaaatgagatgccaggttatacgttaatttttgaggagcgtgattctcccttcaagtttagtattataatggcaagatttaatatatatttgaatctaaatcgaaaacatcaaagccacgccaaacagttgaaaattattgaaattccaaatgtttcgatatttggcgaaaccaatttgttctctcaaaaatttcgtctttctaataacctacacgcaaaggaactagagaacgctatttttaacatcaaaggtaatatatcctccttaactattgacatggatccagtaaatatttcctttatcaaatgcttcctatcaaacattaaagtctttacgtcctcttgtccgaaaaacaagattttaaaggagaattctcatgtaaagttcttaacaaggcggagagtcctatttgactattttaagtgttttttgcctctaatcaatatgaaattcaccctggatgatcccaaatttgttatcaatgataaagacgatctgatcataggcaagttttctgtcttcatgataagccatcactctaaaagatatacattgggtaacaatcttatggaagaaaaagaagagacgcaacacattttttatgaaagccattggaatgttgaattactagatatgaaattacagcatattataaaacatcaaaaatacgagcatacaatattaagggtggacagcattgccatagaagaaaaagttcaacttttaccggatatattatgttctgcaaacgctgatatcgacacgctaatgctagatttatctgaacttccaacaatggttatgttgagtgaattagtacacaacttagatagtcagttggcaaatgtcgaagagaattatttcaaagagttctatgaaaagttcgcatctaatttacaaaatatgaaagctgaatgttctaatatggctaaatgtttgagacagaaggaaattttaccaagcgacttcatgttccagcaactacctgattttttcgattatattaaaatcaatattagagacatatcatccaccctaggtgctaggtcggtttttatgccaagagatgttttctcttccgttgactctcaaagttcaaaggacctaattgatggcaaactaagaaaatactgcaatacagtcgaaaaattgcaaattgctttatttggtgacaagacacaatggcataacaaaattggctcaaatcacgctactatggttaggtctggtcagctcacaaattttagtaaagataataaacagaatcctaaccataagtccagtattgccgatttagacgatatatcgactagtgatgcgacagaggtaaatcatctttggaacatcaacttactagtaaatgatataactacgtcaataatcggagagacacccgaagtgagcgaagaattgtccactaaaactgtttccaaagtttctaatttatcaattaagctatttccagacactgagtcatttagtagcaatgaaagcgattcgaagataattttgcaaataaatcactccagaggaacatcggtagtatcactgatgagtatctttttggccgtctcaggaatacacacactgaaccaaatatttggacattgtatacaccaaaagatgcgacagtctaaaactaaacaatactttcttgccctctcagaatccaaaaaaaaatcatgtatcaaaagtataaaatggggccaactaaaggagttactcgaaataaatttctcttctgaatatatcagccaaataatcgcactcccaaatggccttagaacaaaatttgaaccaacttcgacatttatcacagtcaaaaactgtaatacaatttcagtttcaggtcagtacttcagaatgatggtagaatctccaacgcagccaaacttttgggagagaatgatctgtatcaatggatttaaagtaatgatacacattgatttattaaaacagcaaatgaaaaagttaaactctttacagaattgggaaaaattaccatccgccataaccttagaaaatgattcatggcacttttccataccgcatcatttcgagatgtttaaaataatagattctattccaactatatttaagagtattaaacaaatgttatattcgttgaaaacatcaaaagacgatttgataattttcccccacaaaatagagactcctttatcactgccaaagattaaactgaaatctaaaaggtggttatttagcatttctgatgatccactagaggcagaattgaatactatctttcagatcggtttacaagaacaacgggagagacttgcgaaattacaggaattcaataaacgcatctctgaagatttgattaaaagtcaaaagaacgctaaagaaatgaaggacgacttcgaggcaattgataacgcaatactaaagcaccgtacaggattgtgggcaaaggatgggaaaaaaagattgcgtaaatccgcaacagattctgaaatacctcttaccccagcagctttgaacattaatggaaagcgtgatgacaggcctgatagaacgcagtttatttctcccgagattgaaaatgcgtacaatactttattagcgaacttctccgattcatggattaaaagggtgaaagaatataaagttaaagaacgtcgtgagttcgataagaacttttctttcttatggggtttcattgattatactaagctccccaaagatattaacaaaaaagttttacctttctcaacaaatccttttttaatgaatttgataattgagaatatcgatattgatataataaggccttcatgtggcattgaaaatattccaaacttcattcacgatgttggaaaaggcgttccgaagaatacagaatattcgattatgattccgatgcatttagatgcgaaatttagtgaagtaagatggcatttgagagattatcccctgccttttgttagtatacctccactaagctctacacaaagtaaagaaacaatacctatgagaatttatggggattttatgataacagaggatatgcttcaatccgacagagagcttagaactttatttgttcctttaataccatcggtaactgttgaaaatacagatagatattactcgttgttcgtgcccagaacaatgactagcgctaagatattcaccgatctaaattttgaaataaactctaaccatacaacacgagtaacttggggtggttcttatcaaccagccattcaacaaacaatgcaatgtttggataacttttcaaagcctccattagatccttctgttaaactagggttttgggataaaacaagatatcttttccatggaaagatcaatatagtttggaaaaagaggggaaaattcgaaatttcccttaaaggcgcaaaaagtccctatatgcttggcggcgaatcagctggtttcatagttggttttgatggtaatgttaacttaaaatgtaacgaagataatgatcccaaaaaatttttatcctgcagcgcagacaaggtccatttcagcattcccaattattttgcaaagccgttactggtatggtctagacctagtaccaatacaatgttcattccaaaccaggacgatacgaacatgcagagatatgcttcattttactatttattgaacactacatcaagtaaaaacgaaaaagcagacaaggaaattatgggaaaatcgttcattgaaaagacaggaattaaactatctgggggtatgacactggatatgggtattctcttcgaaaggttggggcctagtttgaatgagagaacttttgagtccaaaaagcattatttgactcgtctatgtaacccaatttacgttcaagatctctcaaaacatgattcatatgctggctttagaagtgactttatacatatgtctttcgggctatcatctaactcaaactccgcatataacgctatgcaactaagtcccaacgggttcaaggcattctttgtttggtggaaatcattttcaggaaactttcccgtaaggagagggccattatttggtctccaaagtatcagtcctaaatttggtgaacatttatataccatttcttaccacgcagatgtctcaccattattcattaattacatgtaccacaacgctgatgccgatcaaattttgcgtaaaaactacttagaagttgccgaatttgctggtttaaaggctaaatcttctcattttattatggatcttcatcaaaggaaggaagtattgactgaatatcaagccggcttgaacgtcagaaggagagttatgaaattaaaatttctggctggtgatgttgtatgccaggacgtggacatccggactgtaagtggtgagttcagtaaattaaactacattgaagagaaagaggatgctgaatatgatatttttgataatgatatgtcgtggcttgatataacagattttcaagatgcatttttcattaaccctgataattatcttccaaaaattaagattatgccatttgccttttctcctcagttcgcttatcaaaaaagagctagttatggtgacaaataccaagttgatccgaaaacatgcaagccaataacgccgtttgataatcgtgtctcccatggctgtacactagggcacaatgtttctttacgtactgacctagttgagaaacgtgttacagttttgaagaagtttcgagagaaattgcaggagggtattagaaaaaacaaatcagccggtgtatcagaggagaatttgaatgatttactctcaaaagcaaattctagtgtggaaaatgcagaattactactgaaagacttccagaagatatttaaacaacatgaagccggacaaacagaacagcctttccatttcgactctttaaatctattgaaaaacaccaaaaagaccctgaaacaatttgaacatagattttttatttttaacgtactgttgaaatggaacgaggacgcaagaagtgctattttcaaatttttttactatgctaacctatccaatgaatttgcttctttagcaagtggcaagggcctaagggaatttgaagatgtaataaagcaaagagaaatgactgatgatacaacgagtatggaagcgataccagaaggaacagacaaagcaaacaccactaaacaatgtcatagctgcgatgatacagagttcaccactgagaaccttttgaatatatttgaaaaaaatattacacaactgtcttgtgacatcaaaaataagatacaccataagttttttgtccaatttataactccacaaattcagttgacatccctggaaaatccagaagcttgtgttttggtttcttcacccttttttatgctaaagacattggaatttgatgcaaacactaccagtaacacgtatatgcaagatatttttttgaaaagacatggcattctattcggaaacgccaatgcctttttatttaataaaaaggattaccaagagttttttgaactatacttcggctccagctcatatggccaagataaaaaagaacagtggccaccatggctaggcttggagttaggattcgaaccttctgcattaaaaaagaaagcagtggttaggaatatttctgctctgcttcatcatcagaaattagcaccgttttctgctaaatatgactccttaaaagataaaatagaagataatatttgcggatacgttcctcaagttaacgtacaagtgaattctgacgagtacctaatgctgacgaagatggccttgaaattattcctttatgtagaacccgaagatgaagaattgaagaaatatattgaaaaactaattattggttacgatatctatgatacagcccaaactagaaaattcgtaaatgatttacacgatagtgaacaaattctagctgttgttgaaaaggagcttttattcaaaagaagcctattggacgacattggaaaactcgatctatccaatattcacaacgaacgcatgcatcagttgttgaggttgtatatcttaaggaaggttttcacttcaaatggaaacaattacattaataggactttagtatggaatatcaaggttaatgaaactatcttgcatttattagacaaaattgacaaaccatttttagatattgccgttgcaaagctaaactttcaaagaatccaacacacgatgggattaaggaagaacactgtaaccgtaaaaatgatgcaaatatttgacttaggcgaaaatgttaattatcattgtattttagggcctttgataacatcaagtggtaatgacacagtcggtttggcgagtgatgttccgttagttcaaataacttgggatgttgataagcctgtaggtggtattaaggttgttaaaaacgttgagaccactttgtcgagtttgacgataaaattagaagaggacagactaaataaactttttgagtggttatcgttaaaggagttaatttacgatggaaacggagatgacgatgatggagcttccagtatttttgatatggtgtcatcagaatcagaggaaggaaaaattgagttttcagaagatattagttctgatttcaatgaaatgttaaagagatcaagtgattatatgatcgttgaagatcttaaattgaacagcttcaaactttgtatcagttataagggcaaaggaaagatgagattggctaacgttactaactttgttttcaatttcccgactttaagattgtccaaccaaactttgagggtcacagatctattacttgcccttaaaaaagtgttaatcaaggttttaataaaacatactgggagatttattggtaataaattgaaaagaaattctaaggagaataaaattgctgacgacacttcaccactgaagcaactcacaacttataattcctacacggagcctgaagaacttcgttaaaaacattcaaaaaaaatttatagtttttcatatctcttaatgtagcatcatacatatcaatatgttaccatgtttcagacctttattgctgtactacattgaaatacctaggattcgaagaacaaaaaacatcatataggtcttccattagtaatgcccattatttacttaaagtaaaaaaaataatggtctctagcgggatcgaaccgctgatccccgcgttattagcacggtgccttaaccaactgggccaagagaccatgaaaaggacgtcaaaacaaggtcacacgaaaaccataacctgtagtataaatataagacatctcaagcacttgttattaattagggaaatagctaacagcatttgaacgataactaaggcaaacaatcctcagtagtaatcgttggaaaaaagatctgagaactaggtgaattttgtgataattgttaaaattccatagttgataaaggcaataacattatgtatgcaggatatgctgaagttcttctcgaggacatatgaatcctcaaagtggaatcggtagtcctgcactataatattacaattatttttcctttcgttttatatgcttacttatcctattacattatcaatctttgcatttcagcttccattaagtcagatgactgtttctcaatctttatgtcgtctttttataccgcatatgataatacacttgtaacatgaacactggtcaatagatgatgatagggtttcgttccaacaccatcacgttatcaattctttcgtgtcaactcctcatttacgttatactctttacattgtgtatggcagtatactagtagtgagaatactagtcaataggttataattgatttttattttaacaagtaacatcttcggaaaagcgactactattcaactaataatcatcaatttttacttcaagaaagcataataacgtctgcatttatgtgtgagcaggactgagcgattctgagggcacttgtattcaccaatttgcaatagctgatctttacaatctgcatgttccgataacaaaaataacttgtaggataaatcctcagagttacatcggtgtgtcagggaatgaacagataaaagaaataacgtcgcactgtaaagtgagtagcagcaaaattaaactattcggacattttaaaaccctatcagtcgccttggatgataaccttatttcaaccacctatcaatgaaaatggcttaaacttccccaattaaaaaactctgcaatagcgtgttgatttcttccagattgatagtttggtacaatacggaagaaacaaggtctctctccatttacattacggtaagctgttcttaattgaactttgaaacatccaatggcgggtaataattatagtatttttcttttctattttatttatttttttttttttttttgattttctagaataatcaatcaatggtaaataaacaaaagttgcttctgttgtaaaaaatacatcaaaggggctaaaatatcaatatacgtttcgttaagttctgcagagagatttggacatatctatttttctctcagatatttgttattgcatattgtgagttgactactggtaagcttatattggaagtttcacaagcattcttttaggacctacagtcgttgctcctcctggctttttttcccttttatttttttctgtttttacttccatttcttttgtgatattagctatccctggtttggtccgcaagtttatgacaaaagatattagaacaggcgatttagtgttatgcaaagttggctcgtttccaccttggccagctgtagtatttccacagcgtttgctgcgaaacgatgtatatagaaagagaaaatccaattgtgttgctgtttgttttttcaacgatccaacttattattgggaacaacccagtagattaaaggagctagatcaagacagcattcacaatttcatattagaacatagtaaaaatgcaaaccaaagggaattggtcaatgcttataaggaagcaaaaaattttgatgatttcaacgtatttttacaagaaaagtttgaagaagaaaacaggttaagtgatctaaaagcgtttgagaaaagtgaaggttctaaaatcgttgccggagaagatccctttgtaggtcgaacaaaagtagtgaataaaagaaaaaaaaattcaatatccatcaaagaagatccggaagataaccagaaatcaaatgaagaagaaagcaaaccgaacatcaaaccgtccaaaaaaaagagacccacagctaattcgggaggaaaatcaaacagtggcaataaaaagaaagttaaattagactattccagaagagtagaaatttcacagttatttcgccgcaggattcaaagaaatctaatccagagagaaacacctcctactgagcatgagatcaaggaaactcatgaactattaaatagaatatatgagaattctgacaccaaacggcccttttttgatttgaaggccctacgcgaaagcaaattacacaagctactgaaagcaattgttaatgatcctgacttaggcgaatttcacccactttgtaaagaaattttactgtcctgggcagacctaatcacagaactgaagaaagaaaagttgcaagcgctacctacgccttgataataatacttattgaatcaattcaatatatcaacgtttcaatatccaatattgtttcatttcatttcatttcaaataaacagtgttttaccgtttgttttgtttcccttctttttttcatcaaatggtaatattaaattgatttaattatccatccataaaaattgtattaataagtcatacacgtaatgtcacaacaaaatatcaggcgtactcttgtgacgtaccaaagcgcttagaaacgataaaggcccgggacagaaatttaaacgtcacaagtgggtgcagcccagttaacactaatgttaacgcacttctagatacctcatatatataaatattatctagaatttcaaatttgatattccttttctatactgaataaacgataaatacgaagttcagagtgcgaaaattagggttgcaggcgtctgatctgaaaaacgtataattgatagtgaaaattatgcaacattctgcaaaggaaagtaaaccttaaaaaaacaaatctctcaagcctttaaagatgaaactcaatgaacaaataccaaaagacctgttacgcctgattaaaagttccaagtatgttcatgtggcgacatgctcgtcaaattgtataccatctgtttcgttgatgcattacatatttgtttcatccgcggaaactttccataaacatgagtatagtatagaaatagattgtaatgactatattatattcacagtgttcgagaaatcagtaacctttcgtaatgtcatgagcaacccaaacgttgcattgctatttcacgattggatcacagctaaaaatttaactcttcgaaaaaaaagcgtccatagtaaagatgatttttcatttgttgagtcagagtctacaaaatttaacaactttttacgagatttgaaccaaagtgaattgaatcaagtgagcgctactatcaatggtattgctgatattgtgaaccctaatagtgaagaatctacttattataggcggttgttattaacagtcaatccagacgcagatatttttatactaggagaagatacagccataataaaggtaaatatacaaaaaataaaagtctctgacatggaaaataatacttctacatacggccaaacagtacaaccagtttaacggaaatatgatgaaaactatgtgtactctaattattatataaagcatctataaaatgaatcatgaggattaggccgtgatcttcgcgctccatatatggagaatacttttaatttcacaggagaaattaagataaataacttgaaaagtccactgagattggtgaaagtgtttcatcctctttttcagtttcccttgaacgatagggtggagtgggacaggcgggagatatgttttcctgtaacggctgcatctctggtatatttccatcccgattatatgttttcatggggctggaagtgaataatgaattcgttcttcttattggagacggggaaagatcaattttcaagggcttaatctcatcgttttctctagctagattagacatggttctcctagatttggtgtatgatggatgaatgtttgaagaatctagtaaatcctccaaaatcctgtacttctcatttgagtaattcaatgcttcttgtaatgattgtagcttgctttccaaggcttttattttctcatctcttttcttaatttgccgctgtagaagaatttctctatctaagtataatgattgatttctatcttttccactcgacccgtcagaactaccacttcttagttcactgatccgttgcttattgtatttcaactccgatatctttctcttaaaggcatcactccttaggatcctagatttggctgtatctgtgtccatataagaaggtcttccctgggatctcttcttcaaaattctagtcatgtcgccacaaacattttgcatcttgctcatattttcattatcattggaaaaaacatctctgattgtctggaatatctttgttaaccttcgtttgggtgttttcctcctgttagtacgaattttttcttcagttttcctatctgtcacctttctaggtctttttagaacgcttttacccgtaggacgcatctgctttcttctgctccttaaggcagatcgttttctcacttcatcaagggacccgtattctcgtttcctgccatcatctcgtattccaaaaaaatctttccacagtccctgtacggattttagcatattaccaatgtctattattgtacctttctcttcagagtatctacttgttcatgttcagcaataatttcataattgttgatgcgcgcatcgtttctatactatgacgcgtcacgaattgtgctagagtggcctctaatgaaagtataagaggcgttggcgaaggtcaaggatagaccattggctgtttcggatgagttatttttaaagtgtaaaggtataacatcaaatgaatgaaaattaacattgatctcagctctcaatttctttcctcatttgttttcgatgtttctatatgagtatacattaaacaagtaaatctcaagctcttgtcaaaacagttatttccaacatatctatctgcattattggtagcataattctcaaaggaagctaaaacatccttcttaaagacgtctattggcaaacgatatgttacgtattccgggtaaaacaaatattccattaagtgaaatgacctttgttttcaaaactaaccagttttagaacagtaattcatataaacaacgtgatcttatatgaaaaactcaccaaaaggagaccaatggattccacagcacttaaggtagctctaggctgtattgcaattcgtttggctgtgaacagcctttttccctctctacaacaacaactggaccagtctgtagaattctcaactcccgtaacttcatttaggtcactacaggaaggtatatacctactgcggaacaacatccaagtatataatcatggggttgttcaccatcctccaattttgattttttttctttccctctttaattccgacaggttaatttccctcatatacgctttaattgatggattaattgcgtatcagctgacagaggtaacaaaggctttcaaaaacttgaaactgaaagtttggctacctggacttctttatgccgtgaatcctttgacccttttatcgtgcattagtcggtcatcaatcatattcacaaattttgctatttcatcgtcattgtattgcatattagctgaaggaaacgttcttttgtcctctgttatgatttctatatctggatatttgtcagtataccctattctcctcttaattccgctattaggtatgctgaaaagttggaggcaaagaatattatctgccattgtttccatactatctttattaattctgctattattcagctacagtatattaggcagccaaagttggtcatttttgacacaggtttatggatctattataacctttgagaaggtttttccaaatctgggtttgtggtggtacttcttcattgaaatgtttgacaccttcataccgttcttcaaggctgtattcaacatttttattgcagtattcattacaccatttactttgcgctatcataagcagccattctacgcattcattttatgcattgggtggattgtccttacaaagccatatccctcactaggtgacgctggttttttcttcagcttcctacctttcttcacgccactatttggatatttaagataccccatcatatcagcattactgtttttacacgcaattgttttggcgccaattttctatcatctttgggttgttttaggttcagggaatagtaattttttctatgctatttccctagtttatgctctggctatagcatctatattagttgacttgaactgggcgatgctgagaattgaatacgataacggtatcccaaatttcaaattgaaggtaacacaaatttaactacttcccgtctataaacgtacataaactagaataaaaagaaccatacagatgttcatcgtaagagtggataaagcgaatatgagagccatattggttattccagaggctatctattttttaagagaaactgcttggttaaaatttgcataatattgtctcggagagaaaagatagaactcagaaggacctaattaatcatgagcgttataatacgaagaattgagatagagtgtatgatctgcggattaagctcctacataataacaacattgtacttgggactatgccaatttctttcccaccaaaagtcgtatgaaaaaggttatcttcgctagggcttccattaggtgaaagccaatatattatcatagaatagcacggcataaatatatattttgtgctgtctttttgggaagggtagtttgacaacccatgtacattaacataaaaagagctttatcattaacggacgaagaaagaatgtgtatcgcgtatttttagactatcgataatcttttttaaagttatggtagatagaagatggaatcagttacgaagtgatgagttcccatacattccagcctgtttacattagctaatttaaaaaaaaaaaacataattagaatattacgtgatgactcagtttaaacggtactctgtaacacatcatttctatttgttgttctaaaacaggttctacatatttggatctgctgtgagaatgacctaaaaggtaaaactctctttgtaataatccaaggaaagtgggagttccttggggaagctctattgcaatatattgtagtttccattcagcctgcttatcgccttaggaaaaaggaatgtaagaggcagaaaagtgcggcgcaatcgttcggacagcgagccgccattataggtaagaatacttaaagagcttcgccggatattattacagtgtattaaatttcgccaagtctttgccaatggaaatgggtgcataaatttatgtgcttggtacatatgagttcaatagatatgtagtagttggatagtagatagttaggatatataatcatggaagggttactcacaacgaatcacataatgagttatgattttcactgtgctcatctgttgcccctacaaggggtgatcaataacaaacaatttcattaaaaaaaaaaaaaaaactaagtcactataactaaacgtaataactatgtatatgaaagaaaataatatctgttcgtcatctagtttaatacggcaacgagtttttcaccagagttcttaccatatttgatgtcttttaggatatgaggaacatcacaaagcccgttcttatagacccttactggaatatggcgaatttgtccatcattaatctttggattgatgaatttgataaattttattgcagctttcctagcttctgagtcggctggtaaagtaatgtttccaaatggtacttcatggccacctattgaatatagccttattatgtcaatagtaacgttttgtctcctgttctcttttttgacgttttcttctgtcaaattttttaattcaacaattgtagcatcctgtttatcggccgcacatttgtacacttgttgaagcgtatcttgattcgcgacacagtcgactaaatacgagatattgttgtacttgtgtttaatttgttctaccacgtcaatatcatgataatcaaataattcatcagcaccatattctttcaaaagtttttcgtgcttccgagaagccacaacaatgatcttggtgaagccattcaatttattggctaattggatgagcgactgacctactgcagttgcaccgccccataataagatggggccttttctttgtggggttgatggctcccacttcaggtccaagcccaagttataggtcaacaccaagccggctgtggtcagtgacactgggatagtggctacaccttccaaagacctgacagggccggcaggtagaacatcctcacccaaaaatttgagttcattgggtgatttgtaggcaaccacagttgaaatagcagaatattcagcaaaagcaccattggaaggaaaccttacggaagatccgtgaatgaacccataaatataatcaccgatagaaaagtctttaggattgacagctgggcccaatttgacaatttggccagcagcatcacatcccagaatagatccttgaggcccgatcttgtagtcaatgtgtgcccaatcagtggggttaccagcaacagcgagtgtcttaatcaatacgaatccttcttccaattcaggaatgggaatgccctctttaacaaccgctttaccgtcttcaatgacgacagccttcatggtttctggaattgcaacttgcatgtttgtaggttatctgtaattgtcgttgataatctgtattcagcttgccattttatagaatatggttagaaagatcttaagctagataaagaaaaagaaaaaaatagaaaaaagcctgcccgctttataagaacttttctcaatatctgttgaggaacacttagtaatatcgtctatcatggttgctttattcttagtgatattactctctgggattcgatgtgttctcatcatctgaagggttttctatgtgttgaaagcctatcccactagacggagccgcgcgtcagccgggcggatccgagacatcttagtcagctgagacaagaaaggcacagctctcggacaggaactgctgtcatatgaaaacctaaaaatgtttcctggaaattccatgactgcgcaaagtttgatacgtttattgttcttctccactaccgcactttctatctcggaaacctttcaactaaatgaactattgttaattgtatggcgtgtggcctttctatttcagaaaatttagagtaaagtaaactccgtcggactagtatagtaatgaaacaagccattgactctgcagcatattgcgaccaaaacctggaaattggtggctatgagttttaatttataattatatgaaaacaaagcttggaatgctgagtactttttcttcaatgctgctcactgcccagaagcgttcagaacaactctactggagccattctgcttgaaggaggataaaaatgccaagatcaagtcttttaaagattctatcccttttcatcgaagaagcactacaagtttattttacagaagttgacaaactgtggaacttgatccatactgaataagtatggaaaactgttaacttagaggatgctctgctttctaaagaagtttcacagctttagactcacatgggttctcatgagtattgctagctagtgcgagtttgatctatacttcacagacttttaacaccccgttccttaagttttccctgattatcaagggtatttccaattcttactccccactatcgctcctttcttatctgaattgtatttttgagtggcctaattgtaatcttttattttgttttctaattattgaaggcggtttctcgaagcatttcacgatttccaaaattcaagaattgaaattatgaacatagaagacaaaatactttttttatcaactattaatacacctttcctagagaacatttttaaaataaaataaaataaagtagcgctctctactacccttacacttttctccttcatatctggctagaaaagagggattacatctcggaatcaaatatttccctctgtgcaaagttttaatactgctactacgaactggttacaattttatttttatcatacacgatactttgaacatcaacttctctcaataccatccgccttcagcggctacaattacgtaattgcaccaaggcattcgccgagagttcacaaattgcagaccctaacagtatacgactcccaacacacgtttaatgttgtacgaattcaagagatagaaatgcttcttccgcggaagccgtttaaagcactgaaattaggcttagacaatagacttctgtacgagggtccaaatctaaaattcagatattctttttgaccgaaaacggaaatcacaggcgcgcaaaagggtttttcaaggtaccccggcatccctataataggcattcccacattctgcgcatacgaatacacatgagtgccataaaacaatactccacatacgaagtctatgaaagatgtatgattcgttcagaaacaagagcatttccatactgataatgagattgtgtgaaagatgagatatggaggatatgtgaggtgctaaatgagcgtctgttaacgaatcgtttaaatagtgatgactgatgaaggcatgggtataaatagagctgcttcaactgtatgcctttgagaatatgtctttattcctttctttcctgttaagcttatatcagcactaacaaacaaaacaaatacaatggtcaaattaacttcaatcgccgctggtgtcgctgccatcgctgctactgcttccgcaaccaccactatagctcaatctgacgaaagagtcaacttggttgaattgggtgtctacgtctctgatatcagagctcacttggcccaatactacatgttccaagccgcccacccaactgaaacctacccagttgaagttgctgaagccgttttcaactacggtgacttcaccaccatgttgactggtattgccccagaccaagtgaccagaatgatcaccggtgttccatggtactccagcagattaaagccagctatctccaaggctctatccaaagatggtatctacactatcgcaaactagggacgagtgcctctacgaatgaaaattcatagacagtaaaaagtaatgaaaaataaaataaaaactacttttttttgatgatataaataccgtagattatataaatgtatattaatattataaacctatttgatcaatgacagtgttcgtgaagcattttatgaatacgataaacataaaaagaaacttttacactattctagaaaaagggtggatggtaataaagctaatagagtatgtccaataaacaataatgaaattggaagcgcatgacttctcagcactttgtctttccataaaaatgagtcgctgcttcttttttcattttttggcgcgtcgcgtcgggccgtatagaatatgcgtcacttctaagaacaagattgcagatcagggcagtgcgagttacggagtcatggtatcaaactctcatttagagaccctcattttttgacactgaaaatatcaaaatttctgggttgcgatagtttttgtgtaaccgtaaccagaaataaagctgaagggttagtgttctatcaacaataagatagagggtggtaagatgaagtgagacaatatcgtaacgtccgtttcagtatacgccgctgataagttatattaccgtaaaattatttgacatttcgttatagatcctattaaataacgtacctatcacagtatcgtcttgttcagatatagtctcttcgtatgagtagtgtcacatacaagattaaagatgcatcagttatgcttttaggatattgcggatagcatatgggaatggaaataggatacaattttatcatagcacccgcatgagtgtcaacacagtaccatattatagcacagtgaatggagagtgttacgacagtgaggtagcatattattctaatgtatggtctgcataagtacgaaatattctgaaatggcatccgttcaagcaaactgcaatattaaggaacttttacgttaatgacgtcatggtagtgttcatactccaagtcaatatgtttttgtattattgttgaagaatagaatatttttatgtttaggtgattttagtggtgatttttctgtaatattggcataagtgtatttaaattgagtggttagtatatggtgcaaaagtaatataacgtatgtattaagagcatttttacaatattcgaggccactgaatgagatatagatattaaaatgtggataatcatgggatttatgggtaaatggcacagagtatagaccgctgaggcaagtgccgtgcataatgatgtgagtgcatttggcactgatttagtgagagatgggccatggagtggagtggaatatgagagtagggtaagttgagatggtatatactgtagtatccgtgtgcgtatgacatatcagtatacaagtgaaggtgagtgtggcaagtggtggtgatggtatagagtgatagggtaagtatatgtgtattgtttacgatcatttgttaacgtttcaatatggtgggtagaacaacagtatggtgagtagtagatgggagatggtagaggaatggcagggtaagtggtggcggagttggatatgggtaattggagggtaacggttatggtggacggtgggttggtggtaggaagtagagaggtggatggtagttgggagtggtatagttgaatgagacagggtaacgagtggggagtagggtaatggagggtaagttgagagacaggttgatcagggttagagtagggtagtgttagggttaggtgtgtgtgtgtgtgtgggtgtggtgtgtgggtgtgtgggtgtggtgtggtgtgtgtgtgtgtggtgtgtgggtgtggtgggtgtggtgtgggtgtgggtgtgggtgtgggtgtgggtgtggtgtgtatatctatgtcaccttattgcatgctggatggtgttagacaaggccgtagggacatatagcatctaggaagtaaccttgtacgaaaataggcaatatttcctgtttgacgcagattttagcccaaagatctagcgtcaaggaatttttttatagtgggacattgcaaaccaaggaagtaacttgatacgtcgttggtgaatgggtctgttttcttattcggcggggtaatacatttttgggggaagtttgtctgtctgacgcgccatatgtaggtacgccaaaaagggctcctctacttcgaagcgcgaggtcgtatacctaataaggaaatgtaatttataactttttattatattggtcttttcgagagcggaacgtaggtccatgtttaaagtatccaagagaatatccacgaagcggctgagcaacgaacagaatcctggttctcctcgactaagcagatagttaagatactgtgcaccatggaaattgaaaacgaaagtacgtaccgactactttatttttgcaggccggaaatcaagcgatgaatgagacatccttctgttttctatgttgtgcttgaaggggacagacagtcgcttatcttagtgagattttgtttgcttttgctgcacctgcatagcgcagattctgcatcttctcaatagcttaattattacattcttagatgatgataagacgaaaactggacaatcttttgtttatattgatggatttcttgtcaaaaagcataaaaatcaacatactattgttaatttcgaaacttacaaaaataaaatgaaagtttccgataggcgtaagtttgaaaaagcaaactttgacgagtttgagtcggctctaaataacaaaaacgacttggtacattgtccctcaataactttatttgaatcgatccccacggaagtgcggtcattctacgaagacgaaaagtctggcctaatcaaagtggtaaaattcagaactggtgcaatggataggaaaaggtcttttgaaaaagttgtcatttccgtcatggtcgggaaaaatgtaaaaaagttcctgacgtttgttgaagacgaaccagatttccagggcggaccaatcccttcaaagtatcttgttcccaagaaaatcaacttgatggtctacacgttgtttcaagtgcatactttgaaattcaatagaaaggattacgataccctttctcttttttacctcaacagaggatactataatgagttgagtttccgtgtcctggaacgttgtcacgaaatagcgagtgctaggccgaacgacagctctacgatgcgtactttcactgactttgtttccggcgcacctattgtaaggagtcttcagaaaagcaccataaggaaatatgggtacaatttggcagcctacacgtagatgagctatgcaagcaagtttacctggcgaaaagaaagtcgacacagagcggctgaagcgtgatctatgcccacgtaaacccattgagataaagtacttttcacagatatgtaacgatatgatgaacaaaaaggaccgattgggtgatattttgcatattatcttgcgagcatgtgcactcaatttcggggcgggtccccgtggtggcgctggtgacgaagaggatcgatctattacgaatgaagaacccattattccctctgtggacgagcatggcctgaaagtatgtaagttgcgcagtcctaacactccacgaagactcagaaaaacactagatgccgtgaaagctttattggtgtcgtcttgtgcttgtaccgcaagggatttagatatatttgatgacaacaacggcgttgcaatgtggaaatggatcaaaattctgtaccacgaagtagcgcaggaaaccacgctgaaggactcttatagaataactttggtaccttcttctgatggtatatcagtatgtggaaaactttggggagagttgaacaactgcttccatatgccagcctcattttgcgtaatcgagaagttttgttcagagaaccgaagcgaggaattgacgagtatctggaaaacgattctttttttcaaatgatacctgttaaatatcgtgaaattgtgctgcccaagttgagaagagatactaacaaaatgaccgcggctcttaaaaataaagtcgctgttgcaattgacgagcttacggtgccacttatgtggatgatccattttgccgtaggatacccttaccgttatccagagcttcagctactcgcttttgccggtcctcagcgcaacgtatacgtcgatgatacaacaagacgcatccaactgtacactgattacaacaagaacggttcatcggagcctcgactaaagacgcttgacggactcacttcagattacgtgttttattttgtcactgtgctaaggcaaatgcaaatatgtgcgcttggtaacagttatgacgcttttaatcatgatccttggatggatgtggtgggatttgaggatccagatcaagtaacaaatcgagacatttcgaggatagttttgtattcctacatgtttctgaataccgcgaagggctgtctggttgaatacgcaacttttcggcagtacatgagggaacttccgaagaatgcacctcagaagctgaattttcgggagatgcgtcaggggttgattgccctaggacggcactgcgtaggtagcagatttgaaacagatttgtacgagtcggcgacgagtgaactcatggccaatcattccgttcaaacagggcgaaatatttacggtgtggattccttttcgttaactagtgtcagtgggacgaccgccactttattgcaggaacgagcttccgagcgctggattcaatggttaggccttgaaagcgactaccattgttcattctctagtactcggaatgcggaagacgtagtggcaggtgaggcggcgagttcagatcatcatcaaaaaatttcaagagtaacgcgaaaaaggccccgagagcccaagagtacaaacgatatcctcgtcgcaggccggaaactctttggcagctcctttgaattcagggacttgcatcagttgcgcttatgtcatgaaatatacatggcagacacaccctctgtggcagtacaggccccaccgggctatggtaagacggagttatttcatctccccttgatagcactggcgtctaagggcgacgtgaaatatgtgtcgtttctgtttgtaccgtacacagtgttgcttgctaattgcatgatcaggttgagccgatgcggttgcttgaatgtggcccctgtaagaaactttattgaagaaggttgcgatggcgttactgatttatacgtggggatctacgatgatcttgctagcactaatttcacagacaggatagctgcgtgggagaatattgttgagtgcacctttaggaccaacaacgtaaaattgggttacctcattgtagatgagtttcacaactttgaaacggaggtctaccggcagtcgcaatttgggggcataactaaccttgattttgacgcttttgagaaagcaatctttttgagcggcacagcacctgaggctgtagctgatgctgcgttgcagcgtattgggcttacgggactggccaagaagtcgatggacatcaacgagctcaaacggtcggaagatctcagcagaggtctatccagctatccaacacggatgtttaatctaatcaaggagaaatccgaggtgcctttagggcatgttcataaaatttggaagaaagtggaatcacagcccgaagaagcactgaagcttcttttagccctctttgaaattgaaccagagtcgaaggccattgtagttgcaagcacaaccaacgaagtggaagaattggcctgctcttggagaaagtattttagggtggtatggatacacgggaagctgggtgctgcagaaaaggtgtctcgcacaaaggagtttgtcactgacggtagcatgcgagttctcatcggaacgaaattagtgactgaaggaattgacattaagcaattgatgatggtgatcatgcttgataatagacttaatattattgagctcattcaaggcgtagggagactaagagatgggggcctctgttatctattatctagaaaaaacagttgggcggcaaggaatcgtaagggtgaattaccaccgattaaggaaggctgtataaccgaacaggtacgcgagttctatggacttgaatcaaagaaaggaaaaaagggccagcatgttggatgctgtggctccaggacagacctgtctgctgacacagtggaactgatagaaagaatggacagattggctgaaaaacaggcgacagcttccatgtcgatcattgcgttaccgtctagcttccaggagagcaatagcagtgacaggtgcagaaagtattgcagcagtgatgaggacagcgacacgtgcattcatggtagtgctaatgccagtaccaatgcgactaccaactccagcactaatgctactaccactgccagcaccaacgtcaggactagtgctactaccactgccagcatcaacgtcaggactagtgcgattaccactgaaagtaccaactccagcactaatgctactaccactgccagcaccaacgtcaggactagtgctactaccactgccagcatcaacgtcaggactagtgcgactaccactgaaagtaccaactccaacactagtgctactaccaccgaaagtaccgactccaacactagtgctactaccaccgaaagtaccgactccaacactagtgctactaccactgctagcaccaactccagcactaatgccactaccactgctagcaccaactccagcactaatgccactaccactgaaagtaccaacgctagtgccaaggaggacgccaataaagatggcaatgctgaggataatagattccatccagtcaccgacattaacaaagagtcgtataagcggaaagggagtcaaatggttttgctagagagaaagaaactgaaagcacaatttcccaatacttccgagaatatgaatgtcttacagtttcttggatttcggtctgacgaaattaaacatcttttcctctatggtattgacgtatacttctgcccagagggagtattcacacaatacggattatgcaagggctgtcaaaagatgttcgagctctgtgtctgttgggctggccagaaagtatcgtatcggaggatggcttgggaagcactagctgtggagagaatgctgcgaaatgacgaggaatacaaagaatacttggaagacatcgagccatatcatggggaccctgtaggatatttgaaatattttagcgtaaaaaggggagagatctactctcagatacagagaaattatgcttggtacctggccattactagaagaagagaaacaattagtgtattggattcgacaagaggcaagcaagggagccaagttttccgcatgtctggaaggcagatcaaagagttgtattataaagtatggagcaacttgcgtgaatcgaagacagaggtgctgcagtactttttgaactgggacgagaaaaagtgccgggaagaatgggaggcaaaagacgatacggtctttgtggaagcgctcgagaaagttggagtttttcagcgtttgcgttccatgacgagcgctggactgcagggtccgcagtacgtcaagctgcagtttagcaggcatcatcgacagttgaggagcagatatgaattaagtctaggaatgcacttgcgagatcagcttgcgctgggagttaccccatctaaagtgccgcattggacggcattcctgtcgatgctgatagggctgttctacaataaaacatttcggcagaaactggaatatcttttggagcagatttcggaggtgtggttgttaccacattggcttgatttggcaaacgttgaagttctcgctgcagataacacgagggtaccgctgtacatgctgatggtagcggttcacaaagagctggatagcgatgatgttccagacggtagatttgatataatattactatgtagagattcgagcagagaagttggagagtgaaggaaattgttgttacgaaagtcagtgattatgtattgtgtagtatagtatattgtaagaaatttttttttctagggaatatgcgttttgatgtagtagtatttcactgttttgatttagtgtttgttgcacggcagtagcgagagacaagtgggaaagagtaggataaaaagacaatctataaaaagtaaacataaaataaaggtagtaagtagcttttggttgaacatccgggtaagagacaacagggcttggaggagacgtacatgagggctatttagggctatttagggctatgtagaagtgctgtagggctaaagaacagggtttcattttcattttttttttttaatttcggtcagaaagccgggtaaggtatgacagcgagagtagaggtagatgtgagagagtgtgtgggtatatatatgtcactgtattgcatgctggatggtgttagacaaggccgtagggacatatagcatctaggaagtaaccttgtacgaaaataggcaatatttcctgtttaggcgattgtgacgcagattttagtccaacgatctagcgtcaaggaatttttttatagtgggacattgcaccaaggaagtaacttgatacgtcgtgggtgaatgggtctgttttcttattcggcggggtaatacatttttgggggaagtttgtctgtctgacgcgccatatgtaggtacgccaaaaagggctcctctacttcgaagcgcgaggtcgtatacctaataaggaaatgtaatttataactttctattatattggtcttttcgagagcggaagaagttgtaggctaagcgcaggctaagcgtaggtccatatttaaagtatccaagagaatatccacgaagcggctgagcaacgaacagaatcctggttctcctcgactaagcagatagttaagatactgtgcaccatggaaattgaaaacgaaagtacgtaccgactactttatttttgcaggccggaaatcaagcgatgaatgagacatccttctgttttctatgttgggacagacagtcgcttatcttagtgagatttcttattaactgaattttctttgctgctgctggagatttgcacctgcatagcgcagattctgcttcttctcaatagagtagcttaattattacattcttagatgatgataagacggaaactggacaatcttttgtttatattgatggatttcttgtcaaaaagcataacaatcaacatactattgttaatttcgaaacttacaaaaataaaatgaaagtttccgataggcgtaagtttgaaaaagcaaactttgacgagtttgagtcggctctaaataacaaaaacgacttggtacattgtccctcaataactttatttgaatcgatccccacggaagtgcggtcattctacgaagacgaaaagtctggcctaatcaaagtggtaaaattcagaactggtgcaatggataggaaaaggtcttttgaaaaaattgtcatttccgtcatggtcgggaaaaatgtacaaaagttcctgacatttgttgaagacgaaccagatttccagggcggaccaatcccttcaaagtatcttattcccaagaaaatcaacttgatggtctacacgttgtttcaagtgcatactttgaaattcaatagaaaggattacgataccctttctcttttttacctcaacagaggatactataatgagttgagtttccgtgtcctggaacgttgtcacgaaatagcgagtgccaggccgaacgacagctctacgatgcgtactttcactgactttgtttctggcgcacctattgtaaggagtcttcagaaaagcaccataaggaaatatgggtacaatttggcaccctacatgttcttgttactacacgtagatgagctatcgattttttctgcataccaagcaagtttacctggcgaaaagaaagtcgacacagagcggctgaagcgtgatctatgcccacgtaaacccattgagataaagtacttttcacagatatgtaacgatatgatgaacaaaaaagaccgattgggtgatattttgcatattatcttgcgagcatgtgcgctcaatttcggggcgggtccccgtggtggcgctggtgacgaagaggatcgatctattacgaatgaagaacccattattccctctgtggacgagcatggcttgaaagtatgtaagttgcgtagtcctaacactccacgaagactcagaaaaacactagatgccgtgaaagctttattggtgtcgtcttgtgcttgtactgcaagggatttagatatatttgatgacaccaacggcgttgcaatgtggaaatggatcaaaattctgtaccacgaagtagcgcaggaaaccacgctgaaggactcttatagaataactttggtaccttcttctgatggtatatcagtatgtggaaaactttttaatcgcgagtatgtccgcggcttttactttgcatgcaaggctcagttcgataacctttggggagagttgaacaactgcttttatatgcctacagtggttgatattgccagcctcattttgcgtaatcgagaagttttgttcagagagccaaagcgaggaattgacgagtatctggaaaacgattcttttcttcaaatgatacctgttaaatatcgtgaaattgtgctgcccaagttgagaagagatactaacaaaatgaccgcggctcttaaaaataaagtcactgttgcaattgacgagcttacggtgccacttatgtggatggtccattttgccgtaggatacccttaccgttatccagagcttcagctactcgcttttgccggtcctcagcgcaacgtatacgtcgatgatacaacaagacgcatccaactgtacactgattacaacaagaacggttcatcggagcctcgacttaagacgcttgacggactcacttcagattacgtgttttattttgtcactgtgctaaggcaaatgcaaatatgtgcgcttggtaacagttatgacgcttttaatcatgatccttggatggatgtggtgggatttgaggatccagatcaagtaacaaatcgagacatttcgaggatagttttgtattcctacatgtttctgaataccgcgaagggctgtctggttgaatacgcaacttttcggcagtacatgagggaacttccgaagaatgcacctcagaagctgaattttcgggagatgcgtcaggggttgattgccctaggacggcactgcgtaggtagcagatttgaaacagatttgtacgagtcggcgacgagtgaactcatggccaatcattccgttcaaacagggcgaaatatttacggtgtggattccttttcgttaactagtgtcagtgggacgaccgccactttattgcaggaacgagcttccgagcgctggattcaatggttaggccttgaaagcgactaccattgttcattctctagtactcggaatgcggaagacgtagtggcaggtgaggcggcgagttcagatcatgatcaaaaaatttcaagagtaacgcgaaaaaggccccgagagcccaagagtacaaacgatatcctcgtcgcaggccagaaactctttggcagctcctttgaattcagggacttgcatcagttgcgcttatgtcatgaaatatacatggcagacacaccctctgtggcagtacaggccccaccgggctatggtaagacggagttatttcatctccccttgatagcactggcgtctaagggcgacgtgaaatatgtgtcgtttctgtttgtaccgtacacagtgttgcttgctaattgcatgatcaggttgagccgatgcggttgcttgaatgtggcccctgtaagaaactttattgaagaaggttgcgatggcgttactgatttatacgtggggatctacgatgatcttgctagcactaatttcacagacaggatagctgcgtgggagaatattgttgagtgcacctttaggaccaacaacgtaaaattgggttacctcattgtagatgagtttcacaactttgaaacggaggtctaccggcagtcgcaatttgggggcataactaaccttgattttgacgcttttgagaaagcaatctttttgagcggcacagcacctgaggctgtagctgatgctgcgttgcagcgtattgggcttacgggactggccaagaagtcgatggacatcaacgagctcaaacggtcggaagatctcagcagaggtctatccagctatccaacacggatgtttaatctaatcaaggagaaatccgaggtgcctttagggcatgttcataaaatttggaagaaagtggaatcacagcccgaagaagcactgaagcttcttttagccctctttgaaattgaaccagagtcgaaggccattgtagttgcaagcacaaccaacgaagtggaagaattggcctgctcttggagaaagtattttagggtggtatggatacacgggaagctgggtgctgcagaaaaggtgtctcgcacaaaggagtttgtcactgacggtagcatgcgagttctcatcggaacgaaattagtgactgaaggaattgacattaagcaattgatgatggtgatcatgcttgataatagacttaatattattgagctcattcaaggcgtagggagactaagagatgggggcctctgttatctattatctagaaaaaacagttgggcggcaaggaatcgtaagggtgaattaccaccgattaaggaaggctgtataaccgaacaggtacgcgagttctatggacttgaatcaaagaaaggaaaaaagggccagcatgttggatgctgtggctccaggacagacctgtctgctgacacagtggaactgatagaaagaatggacagattggctgaaaaacaggcgacagcttccatgtcgatcattgcgttaccgtctagcttccaggagagcaatagcagtgacaggtgcagaaagtattgcagcagtgatgaggacagcgacacgtgcattcatggtagtgctaatgccagtaccaatgcgactaccaactccagcactaatgctactaccactgccagcaccaacgtcaggactagtgctactaccactgccagcatcaacgtcaggactagtgcgattaccactgaaagtaccaactccagcactaatgctactaccactgccagcaccaacgtcaggactagtgctactaccactgccagcatcaacgtcaggactagtgcgactaccactgaaagtaccaactccaacactagtgctactaccaccgaaagtaccgactccaacactagtgctactaccaccgaaagtaccgactccaacactagtgctactaccactgctagcaccaactccagcactaatgccactaccactgctagcaccaactccagcactaatgccactaccactgaaagtaccaacgctagtgccaaggaggacgccaataaagatggcaatgctgaggataatagattccatccagtcaccgacattaacaaagagtcgtataagcggaaagggagtcaaatggttttgctagagagaaagaaactgaaagcacaatttcccaatacttccgagaatatgaatgtcttacagtttcttggatttcggtctgacgaaattaaacatcttttcctctatggtattgacgtatacttctgcccagagggagtattcacacaatacggattatgcaagggctgtcaaaagatgttcgagctctgtgtctgttgggctggccagaaagtatcgtatcggaggatggcttgggaagcactagctgtggagagaatgctgcgaaatgacgaggaatacaaagaatacttggaagacatcgagccatatcatggggaccctgtaggatatttgaaatattttagcgtaaaaaggggagagatctactctcagatacagagaaattatgcttggtacctggccattactagaagaagagaaacaattagtgtattggattcgacaagaggcaagcaagggagccaagttttccgcatgtctggaaggcagatcaaagagttgtattataaagtatggagcaacttgcgtgaatcgaagacagaggtgctgcagtactttttgaactgggacgagaaaaagtgccgggaagaatgggaggcaaaagacgatacggtctttgtggaagcgctcgagaaagttggagtttttcagcgtttgcgttccatgacgagcgctggactgcagggtccgcagtacgtcaagctgcagtttagcaggcatcatcgacagttgaggagcagatatgaattaagtctaggaatgcacttgcgagatcagcttgcgctgggagttaccccatctaaagtgccgcattggacggcattcctgtcgatgctgatagggctgttctacaataaaacatttcggcagaaactggaatatcttttggagcagatttcggaggtgtggttgttaccacattggcttgatttggcaaacgttgaagttctcgctgcagataacacgagggtaccgctgtacatgctgatggtagcggttcacaaagagctggatagcgatgatgttccagacggtagatttgatataatattactatgtagagattcgagcagagaagttggagagtgaaggaaattgttgttacgaaagtcagtgattatgtattgtgtagtatagtatattgtaagaaatttttttttctagggaatatgcgttttgatgtagtagtatttcactgttttgatttagtgtttgttgcacggcagtagcgagagacaagtgggaaagagtaggataaaaagacaatctataaaaagtaaacataaaataaaggtagtaagtagcttttggttgaacatccgggtaagagacaacagggcttggaggagacgtacatgagggctattt

SEQ ID NO: 143 - DNA, 5631 bp, Unknown; identical to SEQ ID NO: 141
  Unclassified

SEQ ID NO: 144 - DNA, 5631 bp, Saccharomyces cerevisiae; identical to SEQ ID NO: 141

SEQ ID NO: 145 - DNA, 7655 bp, Unknown; identical to SEQ ID NO: 110
  Unclassified
